(19) United States
(12) Patent Application Publication
(10) Pub. No.: US 2014/0302035 A1
(43) Pub. Date: Oct. 9, 2014

(54) ANTI-C-MET Tandem Fc Bispecific Antibodies

(71) Applicants: ADIMAB, LLC, Lebanon, NH (US); MERRIMACK PHARMACEUTICALS, INC., Cambridge, MA (US)

(72) Inventors: Brian HARMS, Roslindale, MA (US); Neeraj KOHLI, Brighton, MA (US); Alexey LUGOVSKOY, Woburn, MA (US); Melissa GEDDIE, Somerville, MA (US); Eric Mark KRAULAND, Lebanon, NH (US); WIlliam George ROACH, Lebanon, NH (US); Stephen SU, Boston, MA (US); Adnan ABU-YOUSIF, Boston, MA (US)

(73) Assignees: ADIMAB, LLC, Lebanon, NH (US); MERRIMACK PHARMACEUTICALS, INC., Cambridge, MA (US)

(21) Appl. No.: 14/199,760

(22) Filed: Mar. 6, 2014

Related U.S. Application Data
(60) Provisional application No. 61/773,764, filed on Mar. 6, 2013.
(60) Provisional application No. 61/773,788, filed on Mar. 6, 2013.

(51) Int. Cl. C07K 16/46

(52) U.S. Cl. CPC C07K 16/468
USPC 424/136.1; 530/387.3; 435/375; 536/23.4; 435/320.1; 435/328; 435/254.2; 435/252.33

(57) ABSTRACT

Provided herein are tandem Fcs and tandem Fc antibodies (“TFcAs”), e.g., tandem Fc bispecific antibodies (“TFcBAs”), which comprise one or at least two binding sites that specifically bind to one or more cell surface receptors. The binding sites are connected through a TFc, which TFc comprises a first Fc region and a second Fc region, wherein the first and the second Fc regions are linked through a TFc linker to form a contiguous polypeptide and dimerize to form an Fc dimer. Exemplary TFcBAs bind to the cell surface receptors c-Met and EpCam and inhibit signal transduction through the cell surface receptor(s) for which the binding sites of the TFcBA are specific.

### CROSS-REFERENCE TO RELATED APPLICATIONS

[0001] This application claims the benefit of U.S. Ser. No. 61/773,764 filed Mar. 6, 2013, and U.S. Ser. No. 61/773,788 filed Mar. 6, 2013; all of the foregoing applications are incorporated by reference in entirety.

### SEQUENCE LISTING

[0002] The instant application contains a Sequence Listing which has been submitted electronically in ASCII format and is hereby incorporated by reference in its entirety. Said ASCII copy, created on Jun. 11, 2014, is named 555041(MMV-002CIP-US)_SL.txt and is 1,397,347 bytes in size.

### BACKGROUND

[0003] It has been established that tumor cells express receptors for growth factors and cytokines that stimulate proliferation of the cells and, moreover, that antibodies to such receptors (e.g., tyrosine kinase receptors) can be effective in blocking the stimulation of cell proliferation mediated by growth factors and cytokines to inhibit tumor cell growth. Commercially available therapeutic antibodies that target receptors on cancer cells include, for example, trastuzumab (Herceptin) for the treatment of breast cancer, which targets the HER2 receptor (also known as ErbB2), and cetuximab (Erbitux) for the treatment of colorectal cancer and head and neck cancer, which targets the epidermal growth factor receptor (EGFR, also known as HER1 or ErbB1).

[0004] While this approach of administering a therapeutic agent comprising only a single therapeutic monoclonal antibody (when administered in the absence of administration of another therapeutic antibody, referred to herein as monotherapy) has shown considerable success in cancer treatment, there are a number of factors that can lead to failure of such treatment or recurrence of tumor growth after initial inhibition. For example, certain tumors rely on more than one growth factor-mediated signal transduction pathway for cell proliferation and thus targeting of a single pathway may prove insufficient to significantly affect tumor cell growth. Alternatively, even in cases where one pathway is the only or predominant growth-stimulatory pathway, certain tumors cells are capable of activating another signaling pathway for growth stimulation when the original one is blocked by antibody (innate resistance to treatment). Still further, some tumors exhibit initial responsiveness to antibody monotherapy but later develop resistance to treatment by switching to use of another signaling pathway (acquired resistance to treatment). Furthermore, some receptors, such as a c-Met receptor, are stimulated by conventional antibodies (e.g., IgG antibodies) to transduce signals into a cell upon which they are expressed. Without intending to be bound by any particular theory of operation, this phenomenon is believed to result from the crosslink pairing of two receptors on the same cell by the paired, generally identical, antigen binding sites present on antibodies such as IgAs, IgDs, IgEs, IgGs and IgMs. Such stimulation may have the opposite effect to that which produces a therapeutic benefit—e.g., cell growth and replication may be upregulated by such anti-c-Met antibodies, rather than inhibited.

[0005] In embodiments, the interaction with a receptor or plurality of receptors (e.g., a c-Met receptor) and a composition of the invention results in an antagonist activity. In a particular embodiment, such interaction results in an antagonist activity and is substantially free or free of agonist activity. In an aspect, antagonist activity is useful for compositions and methods of inhibiting cancer.

[0006] Accordingly, additional therapeutic approaches for cancer treatment are needed to overcome limitations of antibody monotherapy and to provide other benefits.

### SUMMARY

[0007] Provided herein are engineered antibodies, such as Tandem Fc Antibodies (“TFcAs”). Exemplary TFcAs are Tandem Fc Bispecific Antibodies (TFcBAs) such as those described in U.S. Provisional Application No. 61/527,802, filed Aug. 26, 2011; and copending PCT International Application No. PCT/US2012/052490, filed Aug. 27, 2012 (see Int'l Pub. No. WO2013/033008A2). A TFcBA comprises a Tandem Fc, which is a polypeptide moiety that comprises a first Fc region and a second Fc region, each of said first Fc region and second Fc region having a C-terminus and an N-terminus; the first Fc region and the second Fc region are linked as a single polypeptide chain through a TFc linker having a C-terminus and an N-terminus (i.e., the C-terminus of the first Fc region is linked by a peptide bond to the N-terminus of the TFc linker, the C-terminus of which TFc linker is in turn linked by a peptide bond to the N-terminus of the second Fc region). A TFcBA may comprise at least two binding sites (at least a first binding site and a second binding site). Each such binding site binds specifically to a specific part of a cell surface receptor. Exemplary cell surface receptors are those that are expressed or overexpressed by cancer cells. Exemplary binding sites include antibody-derived binding sites that bind immunospecifically to an extracellular domain of a cell surface receptor. The first or the second binding site of a TFcA or TFcBA may bind specifically to a human receptor protein selected from the group consisting of ErbB2, ErbB3 (e.g., a binding site described in U.S. Pat. No. 7,846,440), ErbB4, IGF1R, IGF2R, Insulin receptor, RON, c-Met, EGFR, VEGFR1, VEGFR2, TNFR, FGFR1-4, PDGFR (alpha and beta), c-Kit, EPCAM and EphA2. Generally, the receptor will be a receptor tyrosine kinase. Typically such binding will be specific to the extracellular portion of the receptor protein. In certain embodiments disclosed herein, one of the at least two binding sites comprised by a TFcBA is a binding site specific to c-Met, e.g., an anti-c-Met Fab or an anti-cMet scFv. In certain exemplified embodiments a TFcBA is provided that comprises a single anti-c-Met binding site and at least one second binding site that does not bind to c-Met, e.g., a binding site specific to ErbB2, ErbB3, ErbB4, IGF1R, IGF2R, Insulin receptor, RON, EGFR, VEGFR1, VEGFR2, TNFR, FGFR1-4, PDGFR (alpha and beta), c-Kit, EPCAM and EphA2, wherein the anti-c-Met binding site and the second binding site are linked through a TFc to form a contiguous polypeptide. TFcBAs are provided that bind to two epitopes (e.g., extracellular epitopes) on a single receptor or to two distinct cell surface receptors and which, upon such binding, strongly inhibit signal transduction that is normally stimulated by a cognate ligand of at least one cell surface receptor to which the TFcBA binds. For example, an anti-c-Met+anti-EGFR TFcBA may inhibit signal transduction induced by either or both of HGF (hepatocyte growth factor, the cognate ligand of C-met) and EGF (epidermal growth factor, the cognate ligand of EGFR), or an anti-c-Kit+anti-RON TFcBA may inhibit signal transduction induced by either or both of Macrophage Stimulating Protein (the cognate ligand of RON) and Stem Cell Factor (the cognate ligand of c-Kit), or an anti-c-Met+anti-EPCAM TFcBA may inhibit signal transduction induced by HGF and may inhibit signaling by the c-Met receptor in the absence of HGF (e.g., ligand-independent c-Met signaling); each such inhibition being with an IC₅₀ of 10 nM or less or 1 nM or less or 100 μM or less, or with a maximal percent inhibition of at least 70% or at least 80% or at least 90%, as indicated by inhibition of ligand-induced (or in the case of c-Met signaling in the absence of HGF, ligand-independent) phosphorylation of the receptor(s) that are signal transduction inhibited by the TFcBA. In many embodiments, anti-c-Met comprising TFcBAs provided herein produce essentially no stimulatory effect on cells expressing c-Met. In other embodiments, anti-c-Met comprising TFcBAs provided herein induce downregulation or degradation of c-Met receptors on cells expressing c-Met. In other embodiments, anti-EPCAM TFcBAs herein provided produce most (e.g., 60%, 70%, 80%, 90% or greater than 95%) of their signaling inhibition effects in cells expressing low EPCAM levels (as few as 100,000+/−5% EPCAM molecules per cell) or very low EPCAM levels (as few as 24,000+/−5% EPCAM molecules per cell). In certain embodiments, expression of the TFcBA in a cell produces (i) more (i.e. a greater percentage of) correctly formed TFcAB molecules relative to the expression of a multivalent antibody that binds to the same receptor(s) but does not comprise a TFc or (ii) more than 80% of correctly formed TFcAB molecules as determined, e.g., by Size Exclusion Chromatography (SEC).

[0008] Also provided herein are Abs which are TFcBAs, wherein the TFcBAs comprise a first binding site and a second binding site, wherein the first binding site binds to a first target and the second binding site binds to a second target, and wherein (i) the first and the second binding sites are linked through a TFc; (ii) the TFc comprises a first Fc region and a second Fc region, each said first Fc region and second Fc region having a C-terminus and an N-terminus; (iii) the first Fc region and the second Fc region are linked through a TFc linker having a C-terminus and an N-terminus to form a contiguous polypeptide; (iv) the first and the second Fc regions associate (bind) to form an Fc dimer; and (v) either or both of the first and the second Fc region comprise one or more amino acid (aa) modification to enhance or stabilize the binding between the first and the second Fc region. The TFcBA may inhibit signal transduction through either or both of the first and the second target. In certain embodiments, expression of the TFcBA in a host cell produces (i) more correctly formed TFcAB molecules relative to the expression in a matched host cell of a multivalent antibody that binds to the same receptor(s) but does not comprise a TFc or (ii) more than 80% of correctly formed TFcBA molecules as determined, e.g., by SEC.

[0009] Further provided herein are monovalent tandem FC antibodies (TFcAs). A monovalent TFcA may comprise a single binding site that binds to a target, wherein the binding site is linked to a TFc comprising a first Fc region and a second Fc region, each said first Fc region and second Fc region having a C-terminus and an N-terminus; and wherein (i) the first Fc region and the second Fc region are linked through a TFc linker having a C-terminus and an N-terminus to form a contiguous polypeptide; (ii) the first and the second Fc regions associate to form an Fc dimer; and (iii) either or both of the first and the second Fc region comprise one or more aa modification to enhance or stabilize the binding between the first and the second Fc region. The monovalent TFcA may inhibit signal transduction through the target. In certain embodiments, expression of the monovalent TFcA in a host cell produces (i) more correctly formed TFcA molecules relative to the expression in a matched host cell of an antibody that does not comprise a TFc or (ii) more than 80% of correctly formed TFcA molecules as determined, e.g., by SEC.

[0010] The first Fc region and the second Fc region of a TFc comprised by a TFcA, such as a TFcBA, may comprise a first and a second CH3 domain, respectively, each said CH3 domain having a C-terminus and an N-terminus. The first and the second Fc regions of a TFc comprised by a TFcA may comprise a first and a second CH2 domain, respectively, each said CH2 domain having a C-terminus and an N-terminus. The first and the second Fc regions of a TFc comprised by a TFcA may comprise a first and a second hinge, respectively, each said first hinge and said second hinge having a C-terminus and an N-terminus. In certain embodiments, the second hinge does not comprise an upper hinge subdomain. The TFc comprised in the TFcA may comprise in amino to carboxyl terminal order: a first CH2 domain, a first CH3 domain, a TFc linker, a second CH2 domain and a second CH3 domain. The TFc comprised in the TFcA may comprise in amino to carboxyl terminal order: a first hinge, a first CH2 domain, a first CH3 domain, a TFc linker, a second CH2 domain and a second CH3 domain. The TFc comprised in the TFcA may comprise in amino to carboxyl terminal order: a first hinge, a first CH2 domain, a first CH3 domain, a TFc linker, a second hinge, a second CH2 domain and a second CH3 domain. The first hinge may comprise an upper hinge subdomain, a core hinge subdomain and a lower hinge subdomain and the second hinge may comprise a core hinge subdomain and a lower hinge subdomain, but not an upper hinge subdomain, each said hinge sub-domain having a C-terminus and an N-terminus. The TFc comprised by the TFcA may comprise in amino to carboxyl terminal order: a first hinge, which is linked at its C-terminus to the N-terminus of a first CH2 domain, which is linked at its C-terminus to the N-terminus of a first CH3 domain, which is linked at its C-terminus to the N-terminus of a TFc linker, which is linked at its C-terminus to the N-terminus of a second hinge, which is linked at its C-terminus to the N-terminus of a second CH2 domain, which is linked at its C-terminus to the N-terminus of a second CH3 domain.

[0011] A TFc linker of a TFc comprised by a TFcA may comprise 20-50 aas. A TFc linker may be a Gly-Ser linker, such as (Gly₄Ser)ₙ, wherein n is 4, 5, 6, 7 or 8 (SEQ ID NO: 490). A TFc linker may also comprise an aa sequence that is at least about 70%, 80%, 90%, 95%, 97%, 98%, or 99% identical to an aa sequence of a Gly-Ser linker or which differs therefrom in at most 20, 15, 10, 5, 4, 3, 2, or 1 aa addition, deletion or substitution.

[0012] A TFc of a TFcA may be an IgG1 TFc. A TFc may be a hybrid TFc, e.g., an IgG1/IgG4 hybrid TFc. A TFc of a TFcA may be an IgG1 TFc and may comprise in amino to carboxyl terminal order: a first IgG1 hinge, a first IgG1 CH2 domain, a first IgG1 CH3 domain, a TFc linker, a second IgG1 hinge, a second IgG1 CH2 domain, and a second IgG1 CH3 domain. A hybrid TFc may comprise in amino to carboxyl terminal order: a first IgG1/IgG4 hinge, a first IgG4 CH2 domain, a first IgG1 CH3 domain, a TFc linker, a second IgG4 hinge, a second IgG4 CH2 domain, and a second IgG1 CH3 domain.

[0013] Either or both of the first CH3 domain and the second CH3 domain of a TFc may comprise one or more aa modifications that enhance or stabilize the binding between the first and the second Fc regions, as evidenced, e.g., by an essentially uniform product (or band) on a non-denaturing SDS-Page gel. Each of the first CH3 domain and the second CH3 domain of a TFc may comprise an amino acid modification, which modification is an Association Enhancing Modification (“AEM”) that enhances the association of the first CH3 domain with the second CH3 domain. An AEM may be comprised by a module selected from the group consisting of AEM module 1, AEM module 2, AEM module 3 and AEM module 4. Either or both of the first Fc region and the second Fc region of a TFc may comprise an aa modification that adds a cysteine as an insertion or replacement, which cysteine forms a disulfide bond with a cysteine in the other Fc region (a “DiS” modification). Either or both of the first and the second Fc region of a TFc may comprise a DiS modification in a hinge. In certain embodiments, either or both of the first and the second Fc region comprise a DiS modification in a CH3 domain. The DiS modification may be comprised by DiS module 1 or DiS module 2. Each of the first CH3 domain and the second CH3 domain of a TFc may comprise one or more AEM modifications and one or more DiS modifications.

[0014] Either or both of the first and the second CH3 domains of a TFc may comprise an aa sequence that is at least 70%, 80%, 90%, 95%, 97%, 98%, or 99% identical to an aa sequence of a CH3 domain provided herein, e.g., selected from the group consisting of SEQ ID NOs:27-98, or which differs therefrom in at most 30, 25, 20, 15, 10, 5, 4, 3, 2, or 1 aa additions, deletions or substitutions. In certain embodiments, if the aa sequence of a CH3 domain is not identical to a sequence selected from the group of sequences SEQ ID NOs:27-98, then the aa sequence of the CH3 domain nevertheless comprises the particular AEM and/or DiS of the sequence to which it is similar. The first CH3 domain or the second CH3 domain of a TFc may comprises an aa sequence provided herein, e.g., selected from the group consisting of SEQ ID NOs:27-98. The first CH3 and second CH3 domains of a TFc together may comprise a pair of two different members, each member being a CH3 aa sequence, each pair selected from the group of pairs consisting of SEQ ID NOs:31 and 35; SEQ ID NOs:33 and 37; SEQ ID NOs:39 and 43; SEQ ID NOs:41 and 45; SEQ ID NOs:47 and 51; SEQ ID NOs:49 and 53; SEQ ID NOs:55 and 59; SEQ ID NOs:57 and 61; SEQ ID NOs:63 and 67; SEQ ID NOs:65 and 69; SEQ ID NOs:71 and 73; SEQ ID NOs:72 and 74; SEQ ID NOs:75 and 79; SEQ ID NOs:77 and 81; SEQ ID NOs:83 and 85; SEQ ID NOs:84 and 86; SEQ ID NOs:87 and 89; SEQ ID NOs:88 and 90; SEQ ID NOs:91 and 93; SEQ ID NOs:92 and 94; SEQ ID NOs:95 and 97; and SEQ ID NOs:96 and 98, each member aa sequence being at least 70%, 80%, 90%, 95%, 97%, 98%, or 99% identical to, or differing in at most 30, 25, 20, 15, 10, 5, 4, 3, 2, or 1 aa additions, deletions or substitutions from the each sequence of each said pair, wherein the first CH3 domain comprises a different member of the pair than is comprised by the second CH3 domain. The first and the second CH3 domains of a TFc may each comprise an aa sequence that identical to an aa sequence of a member of the pair of CH3 aa sequences selected from the group consisting of SEQ ID NOs:31 and 35; SEQ ID NOs:33 and 37; SEQ ID NOs:39 and 43; SEQ ID NOs:41 and 45; SEQ ID NOs:47 and 51; SEQ ID NOs:49 and 53; SEQ ID NOs:55 and 59; SEQ ID NOs:57 and 61; SEQ ID NOs:63 and 67; SEQ ID NOs:65 and 69; SEQ ID NOs:71 and 73; SEQ ID NOs:72 and 74; SEQ ID NOs:75 and 79; SEQ ID NOs:77 and 81; SEQ ID NOs:83 and 85; SEQ ID NOs:84 and 86; SEQ ID NOs:87 and 89; SEQ ID NOs:88 and 90; SEQ ID NOs:91 and 93; SEQ ID NOs:92 and 94; SEQ ID NOs:95 and 97; and SEQ ID NOs:96 and 98.

[0015] The first hinge of a TFc may comprise an aa sequence that differs in at most 3, 2 or 1 aa deletions, additions or substitutions from an aa sequence of a hinge provided herein, e.g., selected from the group consisting of SEQ ID NOs:4, 18, 19, 20, 21, 22, 263-265 and 267-273. The first hinge of a TFc may comprise an aa sequence that is an aa sequence selected from the group consisting of SEQ ID NOs:4, 18, 19, 20, 21, 22, 263-265 and 267-273. The second hinge of a TFc may comprise an aa sequence that differs in at most 3, 2 or 1 aa deletions, additions or substitutions from an aa sequence of a hinge provided herein, e.g., selected from the group consisting of SEQ ID NOs:23, 24, 263-265 and 267-273. The second hinge may comprise an aa sequence that is an aa sequence selected from the group consisting of SEQ ID NOs:23, 24, 263-265 and 267-273.

[0016] A CH2 domain of a TFc may comprise an aa sequence that is at least 70%, 80%, 90%, 95%, 97%, 98%, or 99% identical to an aa sequence of a CH2 domain provided herein, e.g., SEQ ID NO:25, 26, 261 or 262, or which differs therefrom in at most 30, 25, 20, 15, 10, 5, 4, 3, 2, or 1 aa deletions, additions or substitutions.

[0017] The TFc may comprise in amino to carboxyl terminal order: a first hinge, a first CH2 domain, a first CH3 domain, a second hinge, a second CH2 domain and a second CH3 domain, wherein (i) the first hinge comprises an aa sequence selected from the group consisting of SEQ ID NOs:4, 18, 19, 263-265 and 267-273; (ii) the first CH2 domain is aglycosylated and comprises the aa sequence set forth as SEQ ID NO:25; (iii) the first CH3 domain comprises an aa sequence that is either sequence of a pair of sequences selected from the group of pairs of CH3 domain sequences consisting of SEQ ID NOs:31 and 35; SEQ ID NOs:33 and 37; SEQ ID NOs:39 and 43; SEQ ID NOs:41 and 45; SEQ ID NOs:47 and 51; SEQ ID NOs:49 and 53; SEQ ID NOs:55 and 59; SEQ ID NOs:57 and 61; SEQ ID NOs:63 and 67; SEQ ID NOs:65 and 69; SEQ ID NOs:71 and 73; SEQ ID NOs:72 and 74; SEQ ID NOs:75 and 79; SEQ ID NOs:77 and 81; SEQ ID NOs:83 and 85; SEQ ID NOs:84 and 86; SEQ ID NOs:87 and 89; SEQ ID NOs:88 and 90; SEQ ID NOs:91 and 93; SEQ ID NOs:92 and 94; SEQ ID NOs:95 and 97; and SEQ ID NOs:96 and 98; (iv) the second hinge comprises an aa sequence consisting of a sequence selected from the group consisting of SEQ ID NO:23, 263-265 and 267-273; (v) the second CH2 domain is aglycosylated and comprises the aa sequence set forth in SEQ ID NO:25; and (vi) the second CH3 domain comprises an aa sequence that is either sequence of a pair of sequences selected from the group of pairs of CH3 domain sequences consisting of SEQ ID NOs:31 and 35; SEQ ID NOs:33 and 37; SEQ ID NOs:39 and 43; SEQ ID NOs:41 and 45; SEQ ID NOs:47 and 51; SEQ ID NOs:49 and 53; SEQ ID NOs:55 and 59; SEQ ID NOs:57 and 61; SEQ ID NOs:63 and 67; SEQ ID NOs:65 and 69; SEQ ID NOs:71 and 73; SEQ ID NOs:72 and 74; SEQ ID NOs:75 and 79; SEQ ID NOs:77 and 81; SEQ ID NOs:83 and 85; SEQ ID NOs:84 and 86; SEQ ID NOs:87 and 89; SEQ ID NOs:88 and 90; SEQ ID NOs:91 and 93; SEQ ID NOs:92 and 94; SEQ ID NOs:95 and 97; and SEQ ID NOs:96 and 98, wherein if the first CH3 domain comprises a first sequence of a pair of sequences, the second CH3 domain comprises the second sequence of the pair of sequences; and if the first CH3 domain comprises the second sequence of a pair of sequences, the second CH3 domain comprises the first sequence of the pair of sequences.

[0018] A TFc may comprise in amino to carboxyl terminal order: a first hinge, a first CH2 domain, a first CH3 domain, a second hinge, a second CH2 domain and a second CH3 domain, wherein (i) the first hinge comprises an aa sequence selected from the group consisting of SEQ ID NOs:20, 21, 22, 263-265 and 267-273; (ii) the first CH2 domain is aglycosylated and comprises the aa sequence set forth in SEQ ID NO:26; (iii) the first CH3 domain comprises an aa sequence that is either sequence of a pair of sequences selected from the group of pairs of CH3 domain sequences consisting of SEQ ID NOs:31 and 35; SEQ ID NOs:33 and 37; SEQ ID NOs:39 and 43; SEQ ID NOs:41 and 45; SEQ ID NOs:47 and 51; SEQ ID NOs:49 and 53; SEQ ID NOs:55 and 59; SEQ ID NOs:57 and 61; SEQ ID NOs:63 and 67; SEQ ID NOs:65 and 69; SEQ ID NOs:71 and 73; SEQ ID NOs:72 and 74; SEQ ID NOs:75 and 79; SEQ ID NOs:77 and 81; SEQ ID NOs:83 and 85; SEQ ID NOs:84 and 86; SEQ ID NOs:87 and 89; SEQ ID NOs:88 and 90; SEQ ID NOs:91 and 93; SEQ ID NOs:92 and 94; SEQ ID NOs:95 and 97; and SEQ ID NOs:96 and 98; (iv) the second hinge comprises an aa sequence consisting of SEQ ID NO:24, 263-265 and 267-273; (v) the second CH2 domain is aglycosylated and comprises the aa sequence set forth in SEQ ID NO:26; and (vi) the second CH3 domain comprises an aa sequence that is either sequence of a pair of sequences selected from the group of pairs of CH3 domain sequences consisting of SEQ ID NOs:31 and 35; SEQ ID NOs:33 and 37; SEQ ID NOs:39 and 43; SEQ ID NOs:41 and 45; SEQ ID NOs:47 and 51; SEQ ID NOs:49 and 53; SEQ ID NOs:55 and 59; SEQ ID NOs:57 and 61; SEQ ID NOs:63 and 67; SEQ ID NOs:65 and 69; SEQ ID NOs:71 and 73; SEQ ID NOs:72 and 74; SEQ ID NOs:75 and 79; SEQ ID NOs:77 and 81; SEQ ID NOs:83 and 85; SEQ ID NOs:84 and 86; SEQ ID NOs:87 and 89; SEQ ID NOs:88 and 90; SEQ ID NOs:91 and 93; SEQ ID NOs:92 and 94; SEQ ID NOs:95 and 97; and SEQ ID NOs:96 and 98, wherein if the first CH3 domain comprises a first sequence of a pair of sequences, the second CH3 domain comprises the second sequence of the pair of sequences; and if the first CH3 domain comprises the second sequence of a pair of sequences, the second CH3 domain comprises the first sequence of the pair of sequences.

[0019] The first or the second Fc region of a TFc may comprise an aa sequence that is at least 70%, 80%, 90%, 95%, 97%, 98%, or 99% identical to an aa sequence of an Fc region provided herein, e.g., selected from the group consisting of SEQ ID NOs:99-166, or differs therefrom in at most 50, 40, 30, 25, 20, 15, 10, 5, 4, 3, 2, or 1 aa deletions, additions or substitutions. The first or the second Fc region comprises an aa sequence selected from the group consisting of SEQ ID NOs:99-166. The first and the second Fc region may comprise an aa sequence that is at least 70%, 80%, 90%, 95%, 97%, 98%, or 99% identical to one aa sequence of a pair of aa sequences selected from the group consisting of SEQ ID NOs:99 and 100; SEQ ID NOs:101 and 102; SEQ ID NOs:103 and 104; SEQ ID NOs:105 and 106; SEQ ID NOs:107 and 108; SEQ ID NOs:109 and 110; SEQ ID NOs:111 and 112; SEQ ID NOs:113 and 114; SEQ ID NOs:115 and 116; SEQ ID NOs:117 and 118; SEQ ID NOs:119 and 120; SEQ ID NOs:121 and 122; SEQ ID NOs:123 and 124; SEQ ID NOs:125 and 126; SEQ ID NOs:127 and 128; SEQ ID NOs:129 and 130; SEQ ID NOs:131 and 132; SEQ ID NOs:133 and 134; SEQ ID NOs:135 and 136; SEQ ID NOs:137 and 138; SEQ ID NOs:139 and 140; SEQ ID NOs:141 and 142; SEQ ID NOs:143 and 144; SEQ ID NOs:145 and 146; SEQ ID NOs:147 and 148; SEQ ID NOs:149 and 150; SEQ ID NOs:151 and 152; SEQ ID NOs:153 and 154; SEQ ID NOs:155 and 156; SEQ ID NOs:157 and 158; SEQ ID NOs:159 and 160; SEQ ID NOs:161 and 162; SEQ ID NOs:163 and 164; and SEQ ID NOs:165 and 166, or which differs therefrom in at most 50, 40, 30, 25, 20, 15, 10, 5, 4, 3, 2, or 1 aa deletions, additions or substitutions, and wherein the first Fc region comprises a different member of the pair than is comprised by the second Fc region. The first Fc region and the second Fc region together may comprise a pair of two different members, each member being an Fc aa sequence, wherein each pair is selected from the group of pairs consisting of SEQ ID NOs:99 and 100; SEQ ID NOs:101 and 102; SEQ ID NOs:103 and 104; SEQ ID NOs:105 and 106; SEQ ID NOs:107 and 108; SEQ ID NOs:109 and 110; SEQ ID NOs:111 and 112; SEQ ID NOs:113 and 114; SEQ ID NOs:115 and 116; SEQ ID NOs:117 and 118; SEQ ID NOs:119 and 120; SEQ ID NOs:121 and 122; SEQ ID NOs:123 and 124; SEQ ID NOs:125 and 126; SEQ ID NOs:127 and 128; SEQ ID NOs:129 and 130; SEQ ID NOs:131 and 132; SEQ ID NOs:133 and 134; SEQ ID NOs:135 and 136; SEQ ID NOs:137 and 138; SEQ ID NOs:139 and 140; SEQ ID NOs:141 and 142; SEQ ID NOs:143 and 144; SEQ ID NOs:145 and 146; SEQ ID NOs:147 and 148; SEQ ID NOs:149 and 150; SEQ ID NOs:151 and 152; SEQ ID NOs:153 and 154; SEQ ID NOs:155 and 156; SEQ ID NOs:157 and 158; SEQ ID NOs:159 and 160; SEQ ID NOs:161 and 162; SEQ ID NOs:163 and 164; and SEQ ID NOs:165 and 166, each member aa sequence being at least 70%, 80%, 90%, 95%, 97%, 98%, or 99% identical to, or differing in at most 50, 40, 30, 25, 20, 15, 10, 5, 4, 3, 2, or 1 aa additions, deletions or substitutions from each sequence of each said pair, wherein the first Fc region comprises a different member of the pair than is comprised by the second Fc region.

[0020] A TFc may comprise an aa sequence that is at least 70%, 80%, 90%, 95%, 97%, 98%, or 99% identical to an aa sequence of a TFc provided herein, e.g., selected from the group consisting of SEQ ID NOs:171, 173, 175, 177, 179, 181, 183, 185, 187, 189, 191, 193, 195, 197, 199, 201, 203, 205, 207, 209, 211, 213, 215, 217, 219 and 221, or which differs therefrom in at most 30, 25, 20, 15, 10, 5, 4, 3, 2, or 1 aa additions, deletions or substitutions. The TFc may comprise an aa sequence selected from the group consisting of SEQ ID NOs:171, 173, 175, 177, 179, 181, 183, 185, 187, 189, 191, 193, 195, 197, 199, 201, 203, 205, 207, 209, 211, 213, 215, 217, 219 and 221.

[0021] A TFcA, e.g., a TFcBA, e.g., an anti-c-Met+anti-EGFR TFcBA or an anti-c-Kit+anti-RON TFcBA or an anti-FGFR2+ anti-EPCAM TFcBA, may comprise a heavy chain that comprises in amino to carboxyl terminal order: a first heavy chain variable (VH) domain, a TFc, a connecting linker and a second VH domain. The heavy chain may comprise in amino to carboxyl terminal order: a first VH domain, a CH1 domain, a TFc, a connecting linker and a second VH domain. The heavy chain may comprise in amino to carboxyl terminal order: a first VH domain, a CH1 domain, a TFc, a connecting linker, a second VH domain, an scFv linker and a second light chain variable (VL) domain, wherein the second VH and VL domains associate to form a second binding site. A TFcA may comprise a light chain that comprises a first VL domain that dimerizes with the first VH domain to form a first binding site. The light chain may comprise a light chain constant (CL) domain that is linked to the carboxyl terminus of the VL domain. The first binding site may be an anti-c-Met, anti-c-Kit, anti-ErbB2, anti-ErbB3, anti-ErbB4, anti-IGF1R, anti-IGF2R, anti-Insulin receptor, anti-RON, anti-EGFR, anti-VEGFR1, anti-VEGFR2, anti-TNFR, anti-FGFR1, anti-FGFR2, anti-FGFR3, anti-FGFR4, anti-PDGFR alpha, anti-PDGFR beta, anti-EPCAM or anti-EphA2 binding site and the second binding site may be an anti-c-Met, anti-c-Kit, anti-ErbB2, anti-ErbB3, anti-ErbB4, anti-IGF1R, anti-IGF2R, anti-Insulin receptor, anti-RON, anti-VEGFR1, anti-VEGFR2, anti-TNFR, anti-FGFR1, anti-FGFR2, anti-FGFR3, anti-FGFR4, anti-PDGFR alpha, anti-PDGFR beta, anti-EphA2 or anti-EGFR binding site. If a TFcA is a monovalent TFcA, the binding site may be an anti-c-Met, anti-c-Kit, anti-ErbB2, anti-ErbB3, anti-ErbB4, anti-IGF1R, anti-IGF2R, anti-Insulin receptor, anti-RON, anti-VEGFR1, anti-VEGFR2, anti-TNFR, anti-FGFR1, anti-FGFR2, anti-FGFR3, anti-FGFR4, anti-PDGFR alpha, anti-PDGFR beta, anti-EPCAM, anti-EphA2 or anti-EGFR binding site. An exemplary anti-c-Met binding site may comprise a VH domain comprising either or both of a) the aa sequence of the VH Complementarity Determining Region (CDR)3 (VHCDR3) in SEQ ID NO:223 or 287 and b) a VLCDR3 comprising the aa sequence of the VLCDR3 in SEQ ID NO:231 or 289. Another exemplary the anti-c-Met binding site may comprise a VH domain comprising a set of three VH CDRs comprising VHCDR1, VCDR2 and VHCDR3, wherein VHCDR1, VHCDR2 and VHCDR3 comprise the aa sequence of the VHCDR1, VHCDR2 and VHCDR3 in SEQ ID NO:223 or 231; and a VL domain comprising a set of three VLCDRs comprising VLCDR1, VLCDR2, and VLCDR3, wherein VLCDR1, VLCDR2 and VLCDR3 comprise the aa sequence of the VLCDR1, VLCDR2 and VLCDR3 in SEQ ID NO:287 or 289, respectively. An exemplary anti-EGFR binding site may comprise either or both of a) a VHCDR3 comprising the aa sequence of the VHCDR3 in SEQ ID NO:233, 237, 258, 275, 277 or 279 and b) a VLCDR3 comprising the aa sequence of the VLCDR3 in SEQ ID NO:233, 237, 258, 275, 277 or 279. An exemplary anti-EGFR binding site may comprise a VH domain comprising a set of three VHCDRs comprising VHCDR1, VCDR2 and VHCDR3, wherein VHCDR1, VHCDR2 and VHCDR3 comprise the aa sequence of the VHCDR1, VHCDR2 and VHCDR3 in SEQ ID NO: 233, 237, 258, 275, 277 or 279; and a VL domain comprising a set of three VLCDRs comprising VLCDR1, VLCDR2, and VLCDR3, wherein VLCDR1, VLCDR2 and VLCDR3 comprise the aa sequence of the VLCDR1, VLCDR2 and VLCDR3 in SEQ ID NO:233, 237, 258, 275, 277 or 279. The anti-c-Met, anti-c-Kit, anti-ErbB2, anti-ErbB3, anti-ErbB4, anti-IGF1R, anti-IGF2R, anti-Insulin receptor, anti-RON, anti-VEGFR1, anti-VEGFR2, anti-TNFR, anti-FGFR1, anti-FGFR2, anti-FGFR3, anti-FGFR4, anti-PDGFR alpha, anti-PDGFR beta, anti-EPCAM, anti-EphA2 or anti-EGFR binding site may comprise an N-terminal portion of the heavy chain and an N-terminal portion of the light chain. The anti-EGFR, anti-c-Kit, anti-ErbB2, anti-ErbB3, anti-ErbB4, anti-IGF1R, anti-IGF2R, anti-Insulin receptor, anti-RON, anti-VEGFR1, anti-VEGFR2, anti-TNFR, anti-FGFR1, anti-FGFR2, anti-FGFR3, anti-FGFR4, anti-PDGFR alpha, anti-PDGFR beta, anti-EPCAM, anti-EphA2 or anti-c-Met binding site may be comprised by a C-terminal scFv that is entirely comprised by the heavy chain to form a contiguous polypeptide.

[0022] An anti-c-Met binding site of a TFcA, e.g., a TFcBA, may be comprised by either or both of a VH domain and a VL domain, wherein the VH domain comprises an aa sequence that is at least 70%, 80%, 90%, 95%, 97%, 98%, or 99% identical to the VH domain of an anti-c-Met binding site, e.g., set forth in SEQ ID NOs:223, 231, 287 or 289, or differs therefrom in at most 10, 9, 8, 7, 6, 5, 4, 3, 2, or 1 aas deletions, additions or substitution; and the VL domain comprises an aa sequence that is at least 70%, 80%, 90%, 95%, 97%, 98%, or 99% identical to the VL domain of an anti-c-Met binding site provided herein, e.g., set forth in SEQ ID NOs:223, 231, 287 or 289, or differs therefrom in at most 10, 9, 8, 7, 6, 5, 4, 3, 2, or 1 aas deletions, additions or substitution.

[0023] An anti-EGFR binding site of a TFcA, e.g., a TFcBA, may be comprised by either or both of a VH domain and a VL domain, wherein the VH domain comprises an aa sequence that is at least 70%, 80%, 90%, 95%, 97%, 98%, or 99% identical to the VH domain of an anti-EGFR binding site provided herein, e.g., set forth in SEQ ID NOs: 233, 237, 258, 275, 277 or 279, or differs therefrom in at most 10, 9, 8, 7, 6, 5, 4, 3, 2, or 1 aa(s) deletion(s), addition(s) or substitution(s); and the VL domain comprises an aa sequence that is at least 70%, 80%, 90%, 95%, 97%, 98%, or 99% identical to the VL domain of an anti-EGFR binding site provided herein, e.g., set forth in SEQ ID NOs: 233, 237, 258, 275, 277 or 279, or differs therefrom in at most 10, 9, 8, 7, 6, 5, 4, 3, 2, or 1 aa(s) deletion(s), addition(s) or substitution(s).

[0024] A TFcA or TFcBA may be a charge-complementary paired TFcA or TFcBA, e.g., wherein: a charge-complementary paired TFcA or TFcBA is a TFcA or TFcBA that comprises a pair of charged amino acids comprising an amino acid selected from group A and an amino acid selected from group B (a charge-complementary pair); wherein group A comprises all natural amino acids with a pI of greater than 7 and group B comprises all natural amino acids with a pI of less than 7, or optionally wherein group A comprises H is, Lys, and Arg, and group B comprises Asp, Glu, Asn, Phe, Gln, Tyr, Ser, Met, Thr, Ile, Gly, Val, Trp, Leu, Ala, and Pro; and said charge-complementary pair consists of a first amino acid residue and a second amino acid residue, and said charge-complementary pair is a position 297 charge-complementary pair or a position 299 charge-complementary pair, wherein a position 297 charge-complementary pair is a charge-complementary pair with said first amino acid residue located at EU position 297 of said first Fc region and said second amino acid residue located at EU position 297 of said second Fc region, and a position 299 charge-complementary pair is a charge-complementary pair with said first amino acid residue located at EU position 299 of said first Fc region and said second amino acid residue located at EU position 299 of said second Fc region. The charge-complementary paired TFcA or TFcBA may comprise both a position 297 charge-complementary pair and a position 299 charge-complementary pair, wherein the first and second amino acid residues of the position 297 charge-complementary pair are the same as or different from the first and second amino acid residues of the position 299 charge-complementary pair. The charge-complementary paired TFcA or may comprise a position 297 charge-complementary pair and wherein the charge-complementary paired TFcA or TFcBA is more stable than a TFcA or TFcBA that is not a charge-complementary paired TFcA or TFcBA but that is identical to the charge-complementary paired TFcA or TFcBA except that amino acid residues corresponding to the first and the second amino acid residues are both residues consisting of the same charged amino acid, said same charged amino acid being one of the amino acids of the position 297 charge-complementary pair of the charge-complementary paired TFcA or TFcBA. The charge-complementary paired TFcA or TFcBA may comprise a position 299 charge-complementary pair and wherein the charge-complementary paired TFcA or TFcBA is more stable than a TFcA or TFcBA that is not a charge-complementary paired TFcA or TFcBA but that is identical to the charge-complementary paired TFcA or TFcBA except that amino acid residues corresponding to the first and the second amino acid residues are both residues consisting of the same charged amino acid, said same charged amino acid being one of the amino acids of the position 299 charge-complementary pair of the charge-complementary paired TFcA or TFcBA.

[0025] The first or the second binding site of a TFcA or TFcBA may bind specifically to a human receptor protein selected from the group consisting of ErbB2, ErbB3, ErbB4, IGF1R, IGF2R, Insulin receptor, RON, c-Met, EGFR, VEGFR1, VEGFR2, TNFR, FGFR1-4, PDGFR (alpha and beta), c-Kit, EPCAM and EphA2.

[0026] Further provided herein are pharmaceutical compositions comprising a TFcA or TFcBA and a pharmaceutically acceptable carrier. Also provided are nucleic acid molecules, e.g., comprising at least one coding sequence, said at least one coding sequence encoding a heavy chain or a light chain of a TFcA or TFcBA. A nucleic acid molecule may comprise at least two coding sequences, wherein one coding sequence encodes a heavy chain of a TFcA or TFcBA and a second coding sequence encodes a light chain of the TFcBA. Also provided are vectors, e.g., comprising one or more nucleic acid molecules provided herein. Further provided are cells, e.g., host cells or isolated cells, comprising one or more vectors and/or nucleic acid molecules provided herein. A cell may comprise a nucleic acid molecule encoding the heavy chain of a TFcA or TFcBA and a nucleic acid molecule encoding the light chain of the TFcA or TFcBA.

[0027] Also encompassed herein are methods of producing a TFcA or TFcBA comprising culturing a host cell described herein under conditions in which the nucleic acids are expressed, and isolating the TFcA or TFcBA. A method for producing a TFcA or TFcBA may comprise culturing a cell described herein under conditions suitable for the expression of the TFcA or TFcBA.

[0028] Also provided herein are methods of treating a subject having cancer, said method comprising administering to a subject a therapeutically effective amount of a TFcA or TFcBA, nucleic acid molecule, or vector described herein.

[0029] Exemplary embodiments include but are not limited to the following items in connection with the subject matter which may be claimed.
[0030] 1. An antibody, which is a Tandem Fc Bispecific Antibody (“TFcBA”), wherein the TFcBA comprises a first binding site that is a single anti-c-Met binding site and at least one second binding site that specifically binds to a cell surface receptor other than c-Met; optionally a cell surface receptor selected from ErbB2, ErbB3, ErbB4, IGF1R, IGF2R, Insulin receptor, RON, EGFR, VEGFR1, VEGFR2, TNFR, FGFR1, FGFR2, FGFR3, FGFR4, PDGFR alpha, PDGFR beta, c-Kit, AXL, ALK, CEA, CD44, EPCAM and EphA2, wherein the anti-c-Met binding site and the second binding site are linked through a Tandem Fc (“TFc”); the TFc comprises a first Fc region and a second Fc region, each said first Fc region and second Fc region having a C-terminus and an N-terminus; the first Fc region and the second Fc region are linked through a TFc linker having a C-terminus and an N-terminus to form a contiguous polypeptide; and the first and the second Fc regions associate to form an Fc dimer.
[0031] 2. The TFcBA of embodiment 1, wherein
   [0032] a. the TFcBA inhibits signal transduction induced by either or both of HGF and a cognate ligand of the receptor specifically bound by the at least one second binding site with an IC50 of 10 nM or less or 1 nM or less or 100 μM or less, or a maximal percent inhibition of at least 70% or at least 80% or at least 90%, as indicated by inhibition of phosphorylation of either or both of c-Met and the receptor specifically bound by the at least one second binding site; or
   [0033] b. expression of the TFcBA in a cell produces (i) more correctly formed TFcAB molecules relative to the expression of a multivalent antibody that does not comprise a TFc or (ii) more than 80% of correctly formed TFcAB molecules as determined by Size Exclusion Chromatography (SEC).
[0034] 3. The TFcBA of embodiment 1 or 2, wherein the first Fc region and the second Fc region comprise a first and a second CH3 domain, respectively, each said CH3 domain having a C-terminus and an N-terminus.
[0035] 4. The TFcBA of anyone of embodiments 1-3, wherein the first and the second Fc regions comprise a first and a second CH2 domain, respectively, each said CH2 domain having a C-terminus and an N-terminus.
[0036] 5. The TFcBA of anyone of embodiments 1-4, wherein the first and the second Fc regions comprise a first and a second hinge, respectively, each said first hinge and said second hinge having a C-terminus and an N-terminus.
[0037] 6. The TFcBA of any one of embodiments 1-5, wherein the second hinge does not comprise an upper hinge subdomain.
[0038] 7. The TFcBA of embodiment 6, wherein the TFc comprised in the TFcBA comprises in amino to carboxyl terminal order: a first CH2 domain, a first CH3 domain, a TFc linker, a second CH2 domain and a second CH3 domain.
[0039] 8. The TFcBA of embodiment 6, wherein the TFc comprised in the TFcBA comprises in amino to carboxyl terminal order: a first hinge, a first CH2 domain, a first CH3 domain, a TFc linker, a second CH2 domain and a second CH3 domain.
[0040] 9. The TFcBA of embodiment 6, wherein the TFc comprised in the TFcBA comprises in amino to carboxyl terminal order: a first hinge, a first CH2 domain, a first CH3 domain, a TFc linker, a second hinge, a second CH2 domain and a second CH3 domain.
[0041] 10. The TFcBA of embodiment 9, wherein the first hinge comprises an upper hinge subdomain, a core hinge subdomain and a lower hinge subdomain and the second hinge comprises a core hinge subdomain and a lower hinge subdomain, but not an upper hinge subdomain, each said hinge sub-domain having a C-terminus and an N-terminus.
[0042] 11. A TFcBA of any one of embodiments 1-10, wherein the TFc comprised by the TFcBA comprises in amino to carboxyl terminal order: a first hinge, which is linked at its C-terminus to the N-terminus of a first CH2 domain, which is linked at its C-terminus to the N-terminus of a first CH3 domain, which is linked at its C-terminus to the N-terminus of a TFc linker, which is linked at its C-terminus to the N-terminus of a second hinge, which is linked at its C-terminus to the N-terminus of a second CH2 domain, which is linked at its C-terminus to the N-terminus of a second CH3 domain.
[0043] 12. The TFcBA of any one of embodiments 1-11, wherein the TFc linker comprises 20-50 aas.
[0044] 13. The TFcBA of embodiment 12, wherein the TFc linker is a Gly-Ser linker
[0045] 14. The TFcBA of embodiment 13, wherein the TFc linker comprises (Gly₄Ser)ₙ, wherein n is 4, 5, 6, 7 or 8 (SEQ ID NO: 490).
[0046] 15. The TFcBA of any one of embodiments 1-14, wherein the TFc is an IgG1 TFc.
[0047] 16. The TFcBA of any of embodiments 1-14, wherein the TFc is a hybrid TFc.
[0048] 17. The TFcBA of embodiment 16, wherein the TFc is an IgG1/IgG4 TFc.
[0049] 18. The TFcBA of embodiment 15, wherein the TFc comprises in amino to carboxyl terminal order: a first IgG1 hinge, a first IgG1 CH2 domain, a first IgG1 CH3 domain, a TFc linker, a second IgG1 hinge, a second IgG1 CH2 domain, and a second IgG1 CH3 domain.
[0050] 19. The TFcBA of embodiment 17, wherein the hybrid TFc comprises in amino to carboxyl terminal order: a first IgG1/IgG4 hinge, a first IgG4 CH2 domain, a first IgG1 CH3 domain, a TFc linker, a second IgG4 hinge, a second IgG4 CH2 domain, and a second IgG1 CH3 domain.
[0051] 20. The TFcBA of anyone of embodiments 1-19, wherein either or both of the first CH3 domain and the second CH3 domain comprise one or more aa modifications that enhance or stabilize the binding between the first and the second Fc regions.
[0052] 21. The TFcBA of embodiment 20, wherein each of the first CH3 domain and the second CH3 domain comprises an amino acid modification, which modification is an Association Enhancing Modification (“AEM”) that enhances the association of the first CH3 domain with the second CH3 domain.
[0053] 22. The TFcBA of embodiment 21, wherein the AEM is comprised by a module selected from the group consisting of AEM module 1, AEM module 2, AEM module 3 and AEM module 4.
[0054] 23. The TFcBA of anyone of embodiments 1-22, wherein either or both of the first Fc region and the second Fc region comprises an aa modification that adds a cysteine as an insertion or replacement, which cysteine forms a disulfide bond with a cysteine in the other Fc region (a “DiS” modification).
[0055] 24. The TFcBA of embodiment 23, wherein either or both of the first and the second Fc region comprise a DiS modification in a hinge.
[0056] 25. The TFcBA of embodiment 23, wherein either or both of the first and the second Fc region comprise a DiS modification in a CH3 domain.
[0057] 26. The TFcBA of any one of embodiments 23-25, wherein the DiS modification is comprised by DiS module 1 or DiS module 2.
[0058] 27. The TFcBA of any one of embodiments 1-26, wherein each of the first CH3 domain and the second CH3 domain comprises one or more AEM modifications and one or more DiS modifications.
[0059] 28. The TFcBA of any one of embodiments 1-27, wherein either or both of the first and the second CH3 domains comprises an aa sequence that is at least 70% identical to an aa sequence selected from the group consisting of SEQ ID NOs:27-98, or which differs therefrom in at most 30 aa additions, deletions or substitutions.
[0060] 29. The TFcBA of embodiment 28, wherein the first CH3 domain or the second CH3 domain comprises an aa sequence selected from the group consisting of SEQ ID NOs:27-98.
[0061] 30. The TFcBA of any one of embodiments 1-28, wherein the first CH3 and second CH3 domains together comprise a pair of two different members, each member being a CH3 aa sequence, each pair selected from the group of pairs consisting of SEQ ID NOs:31 and 35;
[0062] SEQ ID NOs:33 and 37; SEQ ID NOs:39 and 43; SEQ ID NOs:41 and 45; SEQ ID NOs:47 and 51; SEQ ID NOs:49 and 53; SEQ ID NOs:55 and 59; SEQ ID NOs:57 and 61; SEQ ID NOs:63 and 67; SEQ ID NOs:65 and 69; SEQ ID NOs:71 and 73; SEQ ID NOs:72 and 74; SEQ ID NOs:75 and 79; SEQ ID NOs:77 and 81; SEQ ID NOs:83 and 85; SEQ ID NOs:84 and 86; SEQ ID NOs:87 and 89; SEQ ID NOs:88 and 90; SEQ ID NOs:91 and 93; SEQ ID NOs:92 and 94; SEQ ID NOs:95 and 97; and SEQ ID NOs:96 and 98, each member aa sequence being at least 70% identical to, or differing in at most 30 aa additions, deletions or substitutions from the each sequence of each said pair, wherein the first CH3 domain comprises a different member of the pair than is comprised by the second CH3 domain.
[0063] 31. The TFcBA of embodiment 30, wherein the first and the second CH3 domains each comprise an aa sequence that identical to an aa sequence of a member of the pair of CH3 aa sequences selected from the group consisting of SEQ ID NOs:31 and 35; SEQ ID NOs:33 and 37; SEQ ID NOs:39 and 43; SEQ ID NOs:41 and 45; SEQ ID NOs:47 and 51; SEQ ID NOs:49 and 53; SEQ ID NOs:55 and 59; SEQ ID NOs:57 and 61; SEQ ID NOs:63 and 67; SEQ ID NOs:65 and 69; SEQ ID NOs:71 and 73; SEQ ID NOs:72 and 74; SEQ ID NOs:75 and 79; SEQ ID NOs:77 and 81; SEQ ID NOs:83 and 85; SEQ ID NOs:84 and 86; SEQ ID NOs:87 and 89; SEQ ID NOs:88 and 90; SEQ ID NOs:91 and 93; SEQ ID NOs:92 and 94; SEQ ID NOs:95 and 97; and SEQ ID NOs:96 and 98.
[0064] 32. The TFcBA of any one of embodiments 1-31, wherein the first hinge comprises an aa sequence that differs in at most 3 aa deletions, additions or substitutions from an aa sequence selected from the group consisting of SEQ ID NOs:4, 18, 19, 20, 21, 22, 263-265 and 267-273.
[0065] 33. The TFcBA of embodiment 32, wherein the first hinge comprises an aa sequence that is an aa sequence selected from the group consisting of SEQ ID NOs:4, 18, 19, 20, 21, 22, 263-265 and 267-273.
[0066] 34. The TFcBA of any one of embodiments 1-33, wherein the second hinge comprises an aa sequence that differs in at most 3 aa deletions, additions or substitutions from an aa sequence selected from the group consisting of SEQ ID NOs:23, 24, 263-265 and 267-273.
[0067] 35. The TFcBA of embodiment 34, wherein the second hinge comprises an aa sequence that is an aa sequence selected from the group consisting of SEQ ID NOs:23, 24, 263-265 and 267-273.
[0068] 36. The TFcBA of any one of embodiments 1-35, comprising a CH2 domain comprising an aa sequence that is at least 70% identical to SEQ ID NO:25, 26, 261 or 262, or which differs therefrom in at most 30 aa deletions, additions or substitutions.
[0069] 37. The TFcBA of any one of embodiments 1-36, wherein the TFc comprises in amino to carboxyl terminal order: a first hinge, a first CH2 domain, a first CH3 domain, a second hinge, a second CH2 domain and a second CH3 domain, wherein
   [0070] a. the first hinge comprises an aa sequence selected from the group consisting of SEQ ID NOs:4, 18, 19, 263-265 and 267-273;
   [0071] b. the first CH2 domain is aglycosylated and comprises the aa sequence set forth as SEQ ID NO:25;
   [0072] c. the first CH3 domain comprises an aa sequence that is either sequence of a pair of sequences selected from the group of pairs of CH3 domain sequences consisting of SEQ ID NOs:31 and 35; SEQ ID NOs:33 and 37; SEQ ID NOs:39 and 43; SEQ ID NOs:41 and 45; SEQ ID NOs:47 and 51; SEQ ID NOs:49 and 53; SEQ ID NOs:55 and 59; SEQ ID NOs:57 and 61; SEQ ID NOs:63 and 67; SEQ ID NOs:65 and 69; SEQ ID NOs:71 and 73; SEQ ID NOs:72 and 74; SEQ ID NOs:75 and 79; SEQ ID NOs:77 and 81; SEQ ID NOs:83 and 85; SEQ ID NOs:84 and 86; SEQ ID NOs:87 and 89; SEQ ID NOs:88 and 90; SEQ ID NOs:91 and 93; SEQ ID NOs:92 and 94; SEQ ID NOs:95 and 97; and SEQ ID NOs:96 and 98;
   [0073] d. the second hinge comprises an aa sequence consisting of a sequence selected from the group consisting of SEQ ID NO:23, 263-265 and 267-273;
   [0074] e. the second CH2 domain is aglycosylated and comprises the aa sequence set forth in SEQ ID NO:25; and
   [0075] f. the second CH3 domain comprises an aa sequence that is either sequence of a pair of sequences selected from the group of pairs of CH3 domain sequences consisting of SEQ ID NOs:31 and 35; SEQ ID NOs:33 and 37; SEQ ID NOs:39 and 43; SEQ ID NOs:41 and 45; SEQ ID NOs:47 and 51; SEQ ID NOs:49 and 53; SEQ ID NOs:55 and 59; SEQ ID NOs:57 and 61; SEQ ID NOs:63 and 67; SEQ ID NOs:65 and 69; SEQ ID NOs:71 and 73; SEQ ID NOs:72 and 74; SEQ ID NOs:75 and 79; SEQ ID NOs:77 and 81; SEQ ID NOs:83 and 85; SEQ ID NOs:84 and 86; SEQ ID NOs:87 and 89; SEQ ID NOs:88 and 90; SEQ ID NOs:91 and 93; SEQ ID NOs:92 and 94; SEQ ID NOs:95 and 97; and SEQ ID NOs:96 and 98, wherein if the first CH3 domain comprises a first sequence of a pair of sequences, the second CH3 domain comprises the second sequence of the pair of sequences; and if the first CH3 domain comprises the second sequence of a pair of sequences, the second CH3 domain comprises the first sequence of the pair of sequences.
[0076] 38. The TFcBA of any one of embodiments 1-36, wherein the TFc comprises in amino to carboxyl terminal order: a first hinge, a first CH2 domain, a first CH3 domain, a second hinge, a second CH2 domain and a second CH3 domain, wherein
   [0077] a. the first hinge comprises an aa sequence selected from the group consisting of SEQ ID NOs:20, 21, 22, 263-265 and 267-273;
   [0078] b. the first CH2 domain is aglycosylated and comprises the aa sequence set forth in SEQ ID NO:26;
   [0079] c. the first CH3 domain comprises an aa sequence that is either sequence of a pair of sequences selected from the group of pairs of CH3 domain sequences consisting of SEQ ID NOs:31 and 35; SEQ ID NOs:33 and 37; SEQ ID NOs:39 and 43; SEQ ID NOs:41 and 45; SEQ ID NOs:47 and 51; SEQ ID NOs:49 and 53; SEQ ID NOs:55 and 59; SEQ ID NOs:57 and 61; SEQ ID NOs:63 and 67; SEQ ID NOs:65 and 69; SEQ ID NOs:71 and 73; SEQ ID NOs:72 and 74; SEQ ID NOs:75 and 79; SEQ ID NOs:77 and 81; SEQ ID NOs:83 and 85; SEQ ID NOs:84 and 86; SEQ ID NOs:87 and 89; SEQ ID NOs:88 and 90; SEQ ID NOs:91 and 93; SEQ ID NOs:92 and 94; SEQ ID NOs:95 and 97; and SEQ ID NOs:96 and 98;
   [0080] d. the second hinge comprises an aa sequence consisting of SEQ ID NO:24, 263-265 and 267-273;
   [0081] e. the second CH2 domain is aglycosylated and comprises the aa sequence set forth in SEQ ID NO:26; and
   [0082] f. the second CH3 domain comprises an aa sequence that is either sequence of a pair of sequences selected from the group of pairs of CH3 domain sequences consisting of SEQ ID NOs:31 and 35; SEQ ID NOs:33 and 37; SEQ ID NOs:39 and 43; SEQ ID NOs:41 and 45; SEQ ID NOs:47 and 51; SEQ ID NOs:49 and 53; SEQ ID NOs:55 and 59; SEQ ID NOs:57 and 61; SEQ ID NOs:63 and 67; SEQ ID NOs:65 and 69; SEQ ID NOs:71 and 73; SEQ ID NOs:72 and 74; SEQ ID NOs:75 and 79; SEQ ID NOs:77 and 81; SEQ ID NOs:83 and 85; SEQ ID NOs:84 and 86; SEQ ID NOs:87 and 89; SEQ ID NOs:88 and 90; SEQ ID NOs:91 and 93; SEQ ID NOs:92 and 94; SEQ ID NOs:95 and 97; and SEQ ID NOs:96 and 98, wherein if the first CH3 domain comprises a first sequence of a pair of sequences, the second CH3 domain comprises the second sequence of the pair of sequences; and if the first CH3 domain comprises the second sequence of a pair of sequences, the second CH3 domain comprises the first sequence of the pair of sequences.
[0083] 39. The TFcBA of any one of embodiments 1-38, wherein the first or the second Fc region comprises an aa sequence that is at least 70% identical to an aa sequence selected from the group consisting of SEQ ID NOs:99-166, or differs therefrom in at most 50 aa deletions, additions or substitutions.
[0084] 40. The TFcBA of any one of embodiment 39, wherein the first or the second Fc region comprises an aa sequence selected from the group consisting of SEQ ID NOs:99-166.
[0085] 41. The TFcBA of embodiment 39, wherein either or both of the first and the second Fc region comprises an aa sequence that is at least 70% identical to one aa sequence of a pair of aa sequences selected from the group consisting of SEQ ID NOs:99 and 100; SEQ ID NOs:101 and 102; SEQ ID NOs:103 and 104; SEQ ID NOs:105 and 106; SEQ ID NOs:107 and 108; SEQ ID NOs:109 and 110; SEQ ID NOs:111 and 112; SEQ ID NOs:113 and 114; SEQ ID NOs:115 and 116; SEQ ID NOs:117 and 118; SEQ ID NOs:119 and 120; SEQ ID NOs:121 and 122; SEQ ID NOs:123 and 124; SEQ ID NOs:125 and 126; SEQ ID NOs:127 and 128; SEQ ID NOs:129 and 130; SEQ ID NOs:131 and 132; SEQ ID NOs:133 and 134; SEQ ID NOs:135 and 136; SEQ ID NOs:137 and 138; SEQ ID NOs:139 and 140; SEQ ID NOs:141 and 142; SEQ ID NOs:143 and 144; SEQ ID NOs:145 and 146; SEQ ID NOs:147 and 148; SEQ ID NOs:149 and 150; SEQ ID NOs:151 and 152; SEQ ID NOs:153 and 154; SEQ ID NOs:155 and 156; SEQ ID NOs:157 and 158; SEQ ID NOs:159 and 160; SEQ ID NOs:161 and 162; SEQ ID NOs:163 and 164; and SEQ ID NOs:165 and 166, or which differs therefrom in at most 50 aa deletions, additions or substitutions, and wherein the first Fc region comprises a different member of the pair than is comprised by the second Fc region.
[0086] 42. The TFcBA of embodiment 40, wherein the first Fc region and the second Fc region together comprise a pair of two different members, each member being an Fc aa sequence, wherein each pair is selected from the group of pairs consisting of SEQ ID NOs:99 and 100; SEQ ID NOs:101 and 102; SEQ ID NOs:103 and 104; SEQ ID NOs:105 and 106; SEQ ID NOs:107 and 108; SEQ ID NOs:109 and 110; SEQ ID NOs:111 and 112; SEQ ID NOs:113 and 114; SEQ ID NOs:115 and 116; SEQ ID NOs:117 and 118; SEQ ID NOs:119 and 120; SEQ ID NOs:121 and 122; SEQ ID NOs:123 and 124; SEQ ID NOs:125 and 126; SEQ ID NOs:127 and 128; SEQ ID NOs:129 and 130; SEQ ID NOs:131 and 132; SEQ ID NOs:133 and 134; SEQ ID NOs:135 and 136; SEQ ID NOs:137 and 138; SEQ ID NOs:139 and 140; SEQ ID NOs:141 and 142; SEQ ID NOs:143 and 144; SEQ ID NOs:145 and 146; SEQ ID NOs:147 and 148; SEQ ID NOs:149 and 150; SEQ ID NOs:151 and 152; SEQ ID NOs:153 and 154; SEQ ID NOs:155 and 156; SEQ ID NOs:157 and 158; SEQ ID NOs:159 and 160; SEQ ID NOs:161 and 162; SEQ ID NOs:163 and 164; and SEQ ID NOs:165 and 166, each member aa sequence being at least 70% identical to, or differing in at most 30 aa additions, deletions or substitutions from each sequence of each said pair, wherein the first Fc region comprises a different member of the pair than is comprised by the second Fc region.
[0087] 43. The TFcBA of any one of embodiments 1-42, comprising a TFc comprising an aa sequence that is at least 70% identical to an aa sequence selected from the group consisting of SEQ ID NOs:171, 173, 175, 177, 179, 181, 183, 185, 187, 189, 191, 193, 195, 197, 199, 201, 203, 205, 207, 209, 211, 213, 215, 217, 219 and 221 or which differs therefrom in at most 30 aa additions, deletions or substitutions.
[0088] 44. The TFcBA of embodiment 43, comprising a TFc comprising an aa sequence selected from the group consisting of SEQ ID NOs:171, 173, 175, 177, 179, 181, 183, 185, 187, 189, 191, 193, 195, 197, 199, 201, 203, 205, 207, 209, 211, 213, 215, 217, 219 and 221.
[0089] 45. The TFcBA of any one of embodiments 1-44, comprising a heavy chain that comprises in amino to carboxyl terminal order: a first heavy chain variable (VH) domain, a TFc, a connecting linker and a second VH domain.
[0090] 46. The TFcBA of embodiment 45, wherein the heavy chain comprises in amino to carboxyl terminal order: a first VH domain, a CH1 domain, a TFc, a connecting linker and a second VH domain.
[0091] 47. The TFcBA of embodiment 46, wherein the heavy chain comprises in amino to carboxyl terminal order: a first VH domain, a CH1 domain, a TFc, a connecting linker, a second VH domain, an scFv linker and a second light chain variable (VL) domain, wherein the second VH and VL domains associate to form a second binding site.
[0092] 48. The TFcBA of embodiment 47, comprising a light chain that comprises a first VL domain that dimerizes with the first VH domain to form a first binding site.
[0093] 49. The TFcBA of embodiment 48, wherein the light chain comprises a light chain constant (CL) domain that is linked to the carboxyl terminus of the VL domain.
[0094] 50. The TFcBA of any one of embodiments 1-49, wherein the first binding site is an N-terminal binding site and the second binding site is a C-terminal binding site.
[0095] 51. The TFcBA of any one of embodiments 1-50, wherein the anti-c-Met binding site comprises a VH comprising either or both of a) the aa sequence of the VH Complementarity Determining Region (CDR)₃ (VHCDR3) in SEQ ID NO:223 or 287 and b) a VLCDR3 comprising the aa sequence of the VLCDR3 in SEQ ID NO:231 or 289.
[0096] 52. The TFcBA of any one of embodiments 1-51, wherein the anti-c-Met binding site comprises a VH domain comprising a set of three VH Complementarity Determining Regions (CDRs) comprising VHCDR1, VCDR2 and VHCDR3, wherein VHCDR1, VHCDR2 and VHCDR3 comprise the aa sequence of the VHCDR1, VHCDR2 and VHCDR3 in SEQ ID NO:223 or 231; and a VL domain comprising a set of three VLCDRs comprising VLCDR1, VLCDR2, and VLCDR3, wherein VLCDR1, VLCDR2 and VLCDR3 comprise the aa sequence of the VLCDR1, VLCDR2 and VLCDR3 in SEQ ID NO:287 or 289, respectively.
[0097] 53. The TFcBA of any one of embodiments 1-52, wherein the second binding site is an anti-EGFR binding site that comprises either or both of a) a VHCDR3 comprising the aa sequence of the VHCDR3 in SEQ ID NO:233, 237, 258, 275, 277 or 279 and b) a VLCDR3 comprising the aa sequence of the VLCDR3 in SEQ ID NO:233, 237, 258, 275, 277 or 279.
[0098] 54. The TFcBA of any one of embodiments 1-53, wherein the second binding site is an anti-EGFR binding site that comprises a VH domain comprising a set of three VHCDRs comprising VHCDR1, VCDR2 and VHCDR3, wherein VHCDR1, VHCDR2 and VHCDR3 comprise the aa sequence of the VHCDR1, VHCDR2 and VHCDR3 in SEQ ID NO: 233, 237, 258, 275, 277 or 279; and a VL domain comprising a set of three VLCDRs comprising VLCDR1, VLCDR2, and VLCDR3, wherein VLCDR1, VLCDR2 and VLCDR3 comprise the aa sequence of the VLCDR1, VLCDR2 and VLCDR3 in SEQ ID NO:233, 237, 258, 275, 277 or 279.
[0099] 55. The TFcBA of any one of embodiments 1-54, wherein the anti-c-Met binding site comprises an N-terminal portion of the heavy chain and an N-terminal portion of the light chain.
[0100] 56. The TFcBA of any one of embodiments 1-55, wherein the second binding site is comprised by a C-terminal scFv that is entirely comprised by the heavy chain.
[0101] 57. The TFcBA of any one of embodiments 1-56, wherein the anti-c-Met binding site is comprised by either or both of a VH domain and a VL domain, wherein the VH domain comprises an aa sequence that is at least 70% identical to the VH domain set forth in SEQ ID NOs:223, 231, 287 or 289 or differs therefrom in at most 10 aas deletions, additions or substitution; and the VL domain comprises an aa sequence that is at least 70% identical to the VL domain set forth in SEQ ID NOs:223, 231, 287 or 289 or differs therefrom in at most 10 aas deletions, additions or substitution.
[0102] 58. The TFcBA of any one of embodiments 1-57, wherein the second binding site is an anti-EGFR binding site that is comprised by either or both of a VH domain and a VL domain, wherein the VH domain comprises an aa sequence that is at least 70% identical to the VH domain set forth in SEQ ID NOs: 233, 237, 258, 275, 277 or 279 or differs therefrom in at most 10 aas deletions, additions or substitution; and the VL domain comprises an aa sequence that is at least 70% identical to the VL domain set forth in SEQ ID NOs: 233, 237, 258, 275, 277 or 279 or differs therefrom in at most 10 aas deletions, additions or substitutions.
[0103] 59. An Ab which is a TFcBA, wherein the TFcBA comprises a first binding site and a second binding site, wherein the first binding site binds to a first target and the second binding site binds to a second target, and wherein
   [0104] the first and the second binding sites are linked through a TFc;
   [0105] the TFc comprises a first Fc region and a second Fc region, each said first Fc region and second Fc region having a C-terminus and an N-terminus; the first Fc region and the second Fc region are linked through a TFc linker having a C-terminus and an N-terminus to form a contiguous polypeptide;
   [0106] the first and the second Fc regions associate to form an Fc dimer; and
   [0107] either or both of the first and the second Fc region comprise one or more aa modification to enhance or stabilize the binding between the first and the second Fc region.
[0108] 60. The TFcBA of embodiment 59, wherein
   [0109] a. the TFcBA inhibits signal transduction through either or both of the first and the second target; or
   [0110] b. expression of the TFcBA in a cell produces (i) more correctly formed TFcAB molecules relative to the expression of a multivalent antibody that does not comprise a TFc or (ii) more than 80% of correctly formed TFcAB molecules as determined by Size Exclusion Chromatography (SEC).
[0111] 61. The TFcBA of embodiment 59 or 60, wherein the first Fc region and the second Fc region comprise a first and a second CH3 domain, respectively, each said CH3 domain having a C-terminus and an N-terminus.
[0112] 62. The TFcBA of anyone of embodiments 59-61, wherein the first and the second Fc regions comprise a first and a second CH2 domain, respectively, each said CH2 domain having a C-terminus and an N-terminus.
[0113] 63. The TFcBA of anyone of embodiments 59-62, wherein the first and the second Fc regions comprise a first and a second hinge, respectively, each said first hinge and said second hinge having a C-terminus and an N-terminus.
[0114] 64. The TFcBA of anyone of embodiments 59-63, wherein the second hinge does not comprise an upper hinge subdomain.
[0115] 65. The TFcBA of embodiment 64, wherein the TFc comprised in the TFcBA comprises in amino to carboxyl terminal order: a first CH2 domain, a first CH3 domain, a TFc linker, a second CH2 domain and a second CH3 domain.
[0116] 66. The TFcBA of embodiment 64, wherein the TFc comprised in the TFcBA comprises in amino to carboxyl terminal order: a first hinge, a first CH2 domain, a first CH3 domain, a TFc linker, a second CH2 domain and a second CH3 domain.
[0117] 67. The TFcBA of embodiment 64, wherein the TFc comprised in the TFcBA comprises in amino to carboxyl terminal order: a first hinge, a first CH2 domain, a first CH3 domain, a TFc linker, a second hinge, a second CH2 domain and a second CH3 domain.
[0118] 68. The TFcBA of embodiment 67, wherein the first hinge comprises an upper hinge subdomain, a core hinge subdomain and a lower hinge subdomain and the second hinge comprises a core hinge subdomain and a lower hinge subdomain, but not an upper hinge subdomain, each said hinge sub-domain having a C-terminus and an N-terminus.
[0119] 69. A TFcBA of any one of embodiments 59-68, wherein the TFc comprised by the TFcBA comprises in amino to carboxyl terminal order: a first hinge, which is linked at its C-terminus to the N-terminus of a first CH2 domain, which is linked at its C-terminus to the N-terminus of a first CH3 domain, which is linked at its C-terminus to the N-terminus of a TFc linker, which is linked at its C-terminus to the N-terminus of a second hinge, which is linked at its C-terminus to the N-terminus of a second CH2 domain, which is linked at its C-terminus to the N-terminus of a second CH3 domain.
[0120] 70. The TFcBA of any one of embodiments 59-69, wherein the TFc linker comprises 20-50 aas.
[0121] 71. The TFcBA of embodiment 70, wherein the TFc linker is a Gly-Ser linker
[0122] 72. The TFcBA of embodiment 71, wherein the TFc linker comprises (Gly₄Ser)ₙ, wherein n is 4, 5, 6, 7 or 8 (SEQ ID NO: 490).
[0123] 73. The TFcBA of any one of embodiments 59-72, wherein the TFc is an IgG1 TFc.
[0124] 74. The TFcBA of any of embodiments 59-72, wherein the TFc is a hybrid TFc.
[0125] 75. The TFcBA of embodiment 74, wherein the TFc is an IgG1/IgG4 TFc.
[0126] 76. The TFcBA of embodiment 73, wherein the TFc comprises in amino to carboxyl terminal order: a first IgG1 hinge, a first IgG1 CH2 domain, a first IgG1 CH3 domain, a TFc linker, a second IgG1 hinge, a second IgG1 CH2 domain, and a second IgG1 CH3 domain.
[0127] 77. The TFcBA of embodiment 75, wherein the hybrid TFc comprises in amino to carboxyl terminal order: a first IgG1/IgG4 hinge, a first IgG4 CH2 domain, a first IgG1 CH3 domain, a TFc linker, a second IgG4 hinge, a second IgG4 CH2 domain, and a second IgG1 CH3 domain.
[0128] 78. The TFcBA of anyone of embodiments 59-77, wherein either or both of the first CH3 domain and the second CH3 domain comprise one or more aa modifications that enhance or stabilize the binding between the first and the second Fc regions.
[0129] 79. The TFcBA of embodiment 78, wherein each of the first CH3 domain and the second CH3 domain comprises an amino acid modification, which modification is an Association Enhancing Modification (“AEM”) that enhances the association of the first CH3 domain with the second CH3 domain.
[0130] 80. The TFcBA of embodiment 79, wherein the AEM is comprised by a module selected from the group consisting of AEM module 1, AEM module 2, AEM module 3 and AEM module 4.
[0131] 81. The TFcBA of anyone of embodiments 1-80, wherein either or both of the first Fc region and the second Fc region comprises an aa modification that adds a cysteine as an insertion or replacement, which cysteine forms a disulfide bond with a cysteine in the other Fc region (a “DiS” modification).
[0132] 82. The TFcBA of embodiment 81, wherein either or both of the first Fc region and the second Fc region comprise a DiS modification in a hinge.
[0133] 83. The TFcBA of embodiment 81, wherein either or both of the first Fc region and the second Fc region comprise a DiS modification in a CH3 domain.
[0134] 84. The TFcBA of any one of embodiments 80-83, wherein the DiS modification is comprised by DiS module 1 or DiS module 2.
[0135] 85. The TFcBA of any one of embodiments 59-84, wherein each of the first CH3 domain and the second CH3 domain comprises one or more AEM modifications and one or more DiS modifications.
[0136] 86. The TFcBA of any one of embodiments 1-85, wherein either or both of the first and the second CH3 domains comprises an aa sequence that is at least 70% identical to an aa sequence selected from the group consisting of SEQ ID NOs:27-98, or which differs therefrom in at most 30 aa additions, deletions or substitutions.
[0137] 87. The TFcBA of embodiment 28, wherein the first CH3 domain or the second CH3 domain comprises an aa sequence selected from the group consisting of SEQ ID NOs:27-98.
[0138] 88. The TFcBA of any one of embodiments 1-86, wherein the first CH3 and second CH3 domains together comprise a pair of two different members, each member being a CH3 aa sequence, each pair selected from the group of pairs consisting of SEQ ID NOs:31 and 35; SEQ ID NOs:33 and 37; SEQ ID NOs:39 and 43; SEQ ID NOs:41 and 45; SEQ ID NOs:47 and 51; SEQ ID NOs:49 and 53; SEQ ID NOs:55 and 59; SEQ ID NOs:57 and 61; SEQ ID NOs:63 and 67; SEQ ID NOs:65 and 69; SEQ ID NOs:71 and 73; SEQ ID NOs:72 and 74; SEQ ID NOs:75 and 79; SEQ ID NOs:77 and 81; SEQ ID NOs:83 and 85; SEQ ID NOs:84 and 86; SEQ ID NOs:87 and 89; SEQ ID NOs:88 and 90; SEQ ID NOs:91 and 93; SEQ ID NOs:92 and 94; SEQ ID NOs:95 and 97; and SEQ ID NOs:96 and 98, each member aa sequence being at least 70% identical to, or differing in at most 30 aa additions, deletions or substitutions from the each sequence of each said pair, wherein the first CH3 domain comprises a different member of the pair than is comprised by the second CH3 domain.
[0139] 89. The TFcBA of embodiment 88, wherein the first and the second CH3 domains each comprise an aa sequence that identical to an aa sequence of a member of the pair of CH3 aa sequences selected from the group consisting of SEQ ID NOs:31 and 35; SEQ ID NOs:33 and 37; SEQ ID NOs:39 and 43; SEQ ID NOs:41 and 45; SEQ ID NOs:47 and 51; SEQ ID NOs:49 and 53; SEQ ID NOs:55 and 59; SEQ ID NOs:57 and 61; SEQ ID NOs:63 and 67; SEQ ID NOs:65 and 69; SEQ ID NOs:71 and 73; SEQ ID NOs:72 and 74; SEQ ID NOs:75 and 79; SEQ ID NOs:77 and 81; SEQ ID NOs:83 and 85; SEQ ID NOs:84 and 86; SEQ ID NOs:87 and 89; SEQ ID NOs:88 and 90; SEQ ID NOs:91 and 93; SEQ ID NOs:92 and 94; SEQ ID NOs:95 and 97; and SEQ ID NOs:96 and 98.
[0140] 90. The TFcBA of any one of embodiments 59-89, wherein the first hinge comprises an aa sequence that differs in at most 3 aa deletions, additions or substitutions from an aa sequence selected from the group consisting of SEQ ID NOs:4, 18, 19, 20, 21, 22, 263-265 and 267-273.
[0141] 91. The TFcBA of embodiment 90, wherein the first hinge comprises an aa sequence that is an aa sequence selected from the group consisting of SEQ ID NOs:4, 18, 19, 20, 21, 22, 263-265 and 267-273
[0142] 92. The TFcBA of any one of embodiments 59-91, wherein the second hinge comprises an aa sequence that differs in at most 3 aa deletions, additions or substitutions from an aa sequence selected from the group consisting of SEQ ID NOs:23, 24, 263-265 and 267-273.
[0143] 93. The TFcBA of embodiment 92, wherein the second hinge comprises an aa sequence that is an aa sequence selected from the group consisting of SEQ ID NOs:23, 24, 263-265 and 267-273.
[0144] 94. The TFcBA of any one of embodiments 59-93, comprising a CH2 domain comprising an aa sequence that is at least 70% identical to SEQ ID NO:25, 26, 261 or 262, or which differs therefrom in at most 30 aa deletions, additions or substitutions.
[0145] 95. The TFcBA of any one of embodiments 1-94, wherein the TFc comprises in amino to carboxyl terminal order: a first hinge, a first CH2 domain, a first CH3 domain, a second hinge, a second CH2 domain and a second CH3 domain, wherein
   [0146] a. the first hinge comprises an aa sequence selected from the group consisting of SEQ ID NOs:4, 18, 19, 263-265 and 267-273;
   [0147] b. the first CH2 domain is aglycosylated and comprises the aa sequence set forth as SEQ ID NO:25;
   [0148] c. the first CH3 domain comprises an aa sequence that is either sequence of a pair of sequences selected from the group of pairs of CH3 domain sequences consisting of SEQ ID NOs:31 and 35; SEQ ID NOs:33 and 37; SEQ ID NOs:39 and 43; SEQ ID NOs:41 and 45; SEQ ID NOs:47 and 51; SEQ ID NOs:49 and 53; SEQ ID NOs:55 and 59; SEQ ID NOs:57 and 61; SEQ ID NOs:63 and 67; SEQ ID NOs:65 and 69; SEQ ID NOs:71 and 73; SEQ ID NOs:72 and 74; SEQ ID NOs:75 and 79; SEQ ID NOs:77 and 81; SEQ ID NOs:83 and 85; SEQ ID NOs:84 and 86; SEQ ID NOs:87 and 89; SEQ ID NOs:88 and 90; SEQ ID NOs:91 and 93; SEQ ID NOs:92 and 94; SEQ ID NOs:95 and 97; and SEQ ID NOs:96 and 98;
   [0149] d. the second hinge comprises an aa sequence consisting of a sequence selected from the group consisting of SEQ ID NO:23, 263-265 and 267-273;
   [0150] e. the second CH2 domain is aglycosylated and comprises the aa sequence set forth in SEQ ID NO:25; and
   [0151] f. the second CH3 domain comprises an aa sequence that is either sequence of a pair of sequences selected from the group of pairs of CH3 domain sequences consisting of SEQ ID NOs:31 and 35; SEQ ID NOs:33 and 37; SEQ ID NOs:39 and 43; SEQ ID NOs:41 and 45; SEQ ID NOs:47 and 51; SEQ ID NOs:49 and 53; SEQ ID NOs:55 and 59; SEQ ID NOs:57 and 61; SEQ ID NOs:63 and 67; SEQ ID NOs:65 and 69; SEQ ID NOs:71 and 73; SEQ ID NOs:72 and 74; SEQ ID NOs:75 and 79; SEQ ID NOs:77 and 81; SEQ ID NOs:83 and 85; SEQ ID NOs:84 and 86; SEQ ID NOs:87 and 89; SEQ ID NOs:88 and 90; SEQ ID NOs:91 and 93; SEQ ID NOs:92 and 94; SEQ ID NOs:95 and 97; and SEQ ID NOs:96 and 98, wherein if the first CH3 domain comprises a first sequence of a pair of sequences, the second CH3 domain comprises the second sequence of the pair of sequences; and if the first CH3 domain comprises the second sequence of a pair of sequences, the second CH3 domain comprises the first sequence of the pair of sequences.
[0152] 96. The TFcBA of any one of embodiments 59-94, wherein the TFc comprises in amino to carboxyl terminal order: a first hinge, a first CH2 domain, a first CH3 domain, a second hinge, a second CH2 domain and a second CH3 domain, wherein
   [0153] a. the first hinge comprises an aa sequence selected from the group consisting of SEQ ID NOs:20, 21, 22, 263-265 and 267-273;
   [0154] b. the first CH2 domain is aglycosylated and comprises the aa sequence set forth in SEQ ID NO:26;
   [0155] c. the first CH3 domain comprises an aa sequence that is either sequence of a pair of sequences selected from the group of pairs of CH3 domain sequences consisting of SEQ ID NOs:31 and 35; SEQ ID NOs:33 and 37; SEQ ID NOs:39 and 43; SEQ ID NOs:41 and 45; SEQ ID NOs:47 and 51; SEQ ID NOs:49 and 53; SEQ ID NOs:55 and 59; SEQ ID NOs:57 and 61; SEQ ID NOs:63 and 67; SEQ ID NOs:65 and 69; SEQ ID NOs:71 and 73; SEQ ID NOs:72 and 74; SEQ ID NOs:75 and 79; SEQ ID NOs:77 and 81; SEQ ID NOs:83 and 85; SEQ ID NOs:84 and 86; SEQ ID NOs:87 and 89; SEQ ID NOs:88 and 90; SEQ ID NOs:91 and 93; SEQ ID NOs:92 and 94; SEQ ID NOs:95 and 97; and SEQ ID NOs:96 and 98;
   [0156] d. the second hinge comprises an aa sequence consisting of SEQ ID NO:24, 263-265 and 267-273;
   [0157] e. the second CH2 domain is aglycosylated and comprises the aa sequence set forth in SEQ ID NO:26; and
   [0158] f. the second CH3 domain comprises an aa sequence that is either sequence of a pair of sequences selected from the group of pairs of CH3 domain sequences consisting of SEQ ID NOs:31 and 35; SEQ ID NOs:33 and 37; SEQ ID NOs:39 and 43; SEQ ID NOs:41 and 45; SEQ ID NOs:47 and 51; SEQ ID NOs:49 and 53; SEQ ID NOs:55 and 59; SEQ ID NOs:57 and 61; SEQ ID NOs:63 and 67; SEQ ID NOs:65 and 69; SEQ ID NOs:71 and 73; SEQ ID NOs:72 and 74; SEQ ID NOs:75 and 79; SEQ ID NOs:77 and 81; SEQ ID NOs:83 and 85; SEQ ID NOs:84 and 86; SEQ ID NOs:87 and 89; SEQ ID NOs:88 and 90; SEQ ID NOs:91 and 93; SEQ ID NOs:92 and 94; SEQ ID NOs:95 and 97; and SEQ ID NOs:96 and 98, wherein if the first CH3 domain comprises a first sequence of a pair of sequences, the second CH3 domain comprises the second sequence of the pair of sequences; and if the first CH3 domain comprises the second sequence of a pair of sequences, the second CH3 domain comprises the first sequence of the pair of sequences.
[0159] 97. The TFcBA of any one of embodiments 59-96, wherein the first or the second Fc region comprises an aa sequence that is at least 70% identical to an aa sequence selected from the group consisting of SEQ ID NOs:99-166, or differs therefrom in at most 50 aa deletions, additions or substitutions.
[0160] 98. The TFcBA of any one of embodiment 97, wherein the first or the second Fc region comprises an aa sequence selected from the group consisting of SEQ ID NOs:99-166.
[0161] 99. The TFcBA of embodiment 97, wherein either or both of the first and the second Fc region comprises an aa sequence that is at least 70% identical to one aa sequence of a pair of aa sequences selected from the group consisting of SEQ ID NOs:99 and 100; SEQ ID NOs:101 and 102; SEQ ID NOs:103 and 104; SEQ ID NOs:105 and 106; SEQ ID NOs:107 and 108; SEQ ID NOs:109 and 110; SEQ ID NOs:111 and 112; SEQ ID NOs:113 and 114; SEQ ID NOs:115 and 116; SEQ ID NOs:117 and 118; SEQ ID NOs:119 and 120; SEQ ID NOs:121 and 122; SEQ ID NOs:123 and 124; SEQ ID NOs:125 and 126; SEQ ID NOs:127 and 128; SEQ ID NOs:129 and 130; SEQ ID NOs:131 and 132; SEQ ID NOs:133 and 134; SEQ ID NOs:135 and 136; SEQ ID NOs:137 and 138; SEQ ID NOs:139 and 140; SEQ ID NOs:141 and 142; SEQ ID NOs:143 and 144; SEQ ID NOs:145 and 146; SEQ ID NOs:147 and 148; SEQ ID NOs:149 and 150; SEQ ID NOs:151 and 152; SEQ ID NOs:153 and 154; SEQ ID NOs:155 and 156; SEQ ID NOs:157 and 158; SEQ ID NOs:159 and 160; SEQ ID NOs:161 and 162; SEQ ID NOs:3 and 164; and SEQ ID NOs:165 and 166, or which differs therefrom in at most 50 aa deletions, additions or substitutions, and wherein the first Fc region comprises a different member of the pair than is comprised by the second Fc region.
[0162] 100. The TFcBA of embodiment 99, wherein the first Fc region and the second Fc region together comprise a pair of two different members, each member being an Fc aa sequence, wherein each pair is selected from the group of pairs consisting of SEQ ID NOs:99 and 100; SEQ ID NOs:101 and 102; SEQ ID NOs:103 and 104; SEQ ID NOs:105 and 106; SEQ ID NOs:107 and 108; SEQ ID NOs:109 and 110; SEQ ID NOs:111 and 112; SEQ ID NOs:113 and 114; SEQ ID NOs:115 and 116; SEQ ID NOs:117 and 118; SEQ ID NOs:119 and 120; SEQ ID NOs:121 and 122; SEQ ID NOs:123 and 124; SEQ ID NOs:125 and 126; SEQ ID NOs:127 and 128; SEQ ID NOs:129 and 130; SEQ ID NOs:131 and 132; SEQ ID NOs:133 and 134; SEQ ID NOs:135 and 136; SEQ ID NOs:137 and 138; SEQ ID NOs:139 and 140; SEQ ID NOs:141 and 142; SEQ ID NOs:143 and 144; SEQ ID NOs:145 and 146; SEQ ID NOs:147 and 148; SEQ ID NOs:149 and 150; SEQ ID NOs:151 and 152; SEQ ID NOs:153 and 154; SEQ ID NOs:155 and 156; SEQ ID NOs:157 and 158; SEQ ID NOs:159 and 160; SEQ ID NOs:161 and 162; SEQ ID NOs:163 and 164; and SEQ ID NOs:165 and 166, each member aa sequence being at least 70% identical to, or differing in at most 30 aa additions, deletions or substitutions from each sequence of each said pair, wherein the first Fc region comprises a different member of the pair than is comprised by the second Fc region.
[0163] 101. The TFcBA of any one of embodiments 59-100, comprising a TFc comprising an aa sequence that is at least 70% identical to an aa sequence selected from the group consisting of SEQ ID NOs:171, 173, 175, 177, 179, 181, 183, 185, 187, 189, 191, 193, 195, 197, 199, 201, 203, 205, 207, 209, 211, 213, 215, 217, 219 and 221 or which differs therefrom in at most 30 aa additions, deletions or substitutions.
[0164] 102. The TFcBA of embodiment 101, comprising a TFc comprising an aa sequence selected from the group consisting of SEQ ID NOs:171, 173, 175, 177, 179, 181, 183, 185, 187, 189, 191, 193, 195, 197, 199, 201, 203, 205, 207, 209, 211, 213, 215, 217, 219 and 221.
[0165] 103. The TFcBA of any one of embodiments 59-102, comprising a heavy chain that comprises in amino to carboxyl terminal order: a first heavy chain variable (VH) domain, a TFc, a connecting linker and a second VH domain.
[0166] 104. The TFcBA of embodiment 103, wherein the heavy chain comprises in amino to carboxyl terminal order: a first VH domain, a CH1 domain, a TFc, a connecting linker and a second VH domain.
[0167] 105. The TFcBA of embodiment 104, wherein the heavy chain comprises in amino to carboxyl terminal order: a first VH domain, a CH1 domain, a TFc, a connecting linker, a second VH domain, an scFv linker and a second light chain variable (VL) domain, wherein the second VH and VL domains associate to form a second binding site.
[0168] 106. The TFcBA of embodiment 105, comprising a light chain that comprises a first VL domain that dimerizes with the first VH domain to form a first binding site.
[0169] 107. The TFcBA of embodiment 106, wherein the light chain comprises a light chain constant (CL) domain that is linked to the carboxyl terminus of the VL domain.
[0170] 108. The TFcBA of any one of embodiments 59-107, wherein the first binding site is an anti-c-Met binding site and the second binding site is an anti-EGFR binding site.
[0171] 109. A monovalent TFcA, comprising a binding site that is linked to a TFc comprising a first Fc region and a second Fc region linked through a TFc linker, wherein the first and the second Fc region associate to form an Fc, and wherein either or both of the first and the second Fc region comprise one or more aa modification to enhance or stabilize the binding between the first and the second Fc region.
[0172] 110. A TFcA or TFcBA of any one of embodiments 1-109 that is a charge-complementary paired TFcA or TFcBA, wherein
   [0173] a charge-complementary paired TFcA or TFcBA is a TFcA or TFcBA that comprises a pair of charged amino acids comprising an amino acid selected from group A and an amino acid selected from group B (a charge-complementary pair)
   [0174] wherein group A comprises all natural amino acids with a pI of greater than 7 and group B comprises all natural amino acids with a pI of less than 7, or optionally wherein group A comprises His, Lys, and Arg, and group B comprises Asp, Glu, Asn, Phe, Gln, Tyr, Ser, Met, Thr, Ile, Gly, Val, Trp, Leu, Ala, and Pro; and
   [0175] said charge-complementary pair consists of a first amino acid residue and a second amino acid residue, and
   [0176] said charge-complementary pair is a position 297 charge-complementary pair or a position 299 charge-complementary pair, wherein
[0177] a position 297 charge-complementary pair is a charge-complementary pair with said first amino acid residue located at EU position 297 of said first Fc region and said second amino acid residue located at EU position 297 of said second Fc region, and a position 299 charge-complementary pair is a charge-complementary pair with said first amino acid residue located at EU position 299 of said first Fc region and said second amino acid residue located at EU position 299 of said second Fc region.
[0178] 111. The charge-complementary paired TFcA or TFcBA of embodiment 110, wherein the charge-complementary paired TFcA or TFcBA comprises both a position 297 charge-complementary pair and a position 299 charge-complementary pair, wherein the first and second amino acid residues of the position 297 charge-complementary pair are the same as or different from the first and second amino acid residues of the position 299 charge-complementary pair.
[0179] 112. The charge-complementary paired TFcA or TFcBA of embodiment 110 or 111, wherein the charge-complementary paired TFcA or TFcBA comprises a position 297 charge-complementary pair and wherein the charge-complementary paired TFcA or TFcBA is more stable than a TFcA or TFcBA that is not a charge-complementary paired TFcA or TFcBA but that is identical to the charge-complementary paired TFcA or TFcBA except that amino acid residues corresponding to the first and the second amino acid residues are both residues consisting of the same charged amino acid, said same charged amino acid being one of the amino acids of the position 297 charge-complementary pair of the charge-complementary paired TFcA or TFcBA.
[0180] 113. The charge-complementary paired TFcA or TFcBA of embodiment 110, 111 or 112, wherein the charge-complementary paired TFcA or TFcBA comprises a position 299 charge-complementary pair and wherein the charge-complementary paired TFcA or TFcBA is more stable than a TFcA or TFcBA that is not a charge-complementary paired TFcA or TFcBA but that is identical to the charge-complementary paired TFcA or TFcBA except that amino acid residues corresponding to the first and the second amino acid residues are both residues consisting of the same charged amino acid, said same charged amino acid being one of the amino acids of the position 299 charge-complementary pair of the charge-complementary paired TFcA or TFcBA.
[0181] 114. The TFcA or TFcBA of any one of embodiments 59-113, wherein the first or the second binding site binds specifically to a human protein selected from the group consisting of ErbB2, ErbB3, ErbB4, IGF1R, IGF2R, Insulin receptor, Ron, c-Met, EGFR, VEGFR1, VEGFR2, TNFR, FGFR1FGFR2, FGFR3, FGFR4, PDGFR alpha, PDGFR beta, c-Kit, EPCAM and EphA2.
[0182] 115. A pharmaceutical composition comprising a TFcA or TFcBA of any one of embodiments 1-114 and a pharmaceutically acceptable carrier.
[0183] 116. A nucleic acid molecule comprising at least one coding sequence, said at least one coding sequence encoding a heavy chain or a light chain of a TFcA or TFcBA of any one of embodiments 1-114.
[0184] 117. A nucleic acid molecule comprising at least two coding sequences, wherein one coding sequence encodes a heavy chain of a TFcA or TFcBA of any one of embodiments 1-114 and a second coding sequence encodes a light chain of the TFcBA.
[0185] 118. A vector comprising one or more nucleic acid molecules of embodiments 116 or 117.
[0186] 119. A cell comprising one or more vectors of embodiment 118 or nucleic acid molecule of embodiments 116 or 117.
[0187] 120. A cell comprising a nucleic acid molecule encoding the heavy chain of a TFcA or TFcBA of any one of embodiments 1-114 and a nucleic acid molecule encoding the light chain of the TFcA or TFcBA.
[0188] 121. A method of producing a TFcA or TFcBA comprising culturing the host cell of embodiment 119 or 120 under conditions in which the nucleic acids are expressed, and isolating the TFcA or TFcBA.
[0189] 122. A method for producing a TFcA or TFcBA, comprising culturing a cell of embodiment 119 or 120 under conditions suitable for the expression of the TFcA or TFcBA.
[0190] 123. A method of treating a subject having cancer, said method comprising administering to a subject a therapeutically effective amount of a TFcA or TFcBA, nucleic acid molecule, or vector of any one of embodiments 1-120.
   Further Exemplary Embodiments Include but are not Limited to the Following Items in Connection with the Subject Matter which May be Embodied.

[0191] A1′. A Tandem Fc Bispecific Antibody (“TFcBA”) that comprises two polypeptide chains, a large chain and a Fab light chain, each chain having a C-terminus and an N-terminus, the TFcBA comprising a first binding site comprised by a Fab moiety comprising the Fab light chain and a Fab heavy chain, which Fab heavy chain is at the N-terminus of the large chain, which Fab moiety specifically binds to cMET, and which TFcBA further comprises a second binding site comprised by a single chain Fv (scFV) moiety at the C-terminus of the large chain, which scFv moiety specifically binds to EpCAM, wherein:

(a) the Fab heavy chain and the scFv moiety are linked through a Tandem Fc (“TFc”);
(b) the TFc is comprised by the large chain and has a first Fc region and a second Fc region which are linked through a TFc linker to form a contiguous polypeptide; and
(c) the first and the second Fc regions associate to form an Fc dimer, and further wherein
(d) the Fab light chain comprises an amino acid sequence comprising the three light chain CDRs present SEQ ID NO:400; and
(e) the Fab heavy chain comprises an amino acid sequence comprising the three heavy chain CDRs present in SEQ ID NO:423.

[0192] A2′. The TFcBA of embodiment A1′, wherein the scFV moiety comprises an amino acid sequence that is SEQ ID NO:488.

[0193] A3′. The TFcBA of embodiment A1′ or of embodiment A2′ wherein the TFcBA large chain comprises, in N-terminal to C-terminal order:
[0194] (i) the Fab heavy chain variable region IgG1 CH1 domain;
[0195] (ii) a hybrid hinge containing an IgG1 upper hinge and an IgG4 middle and lower hinge;
[0196] (iii) a first IgG4 CH2 domain comprising a T299K mutation;
[0197] (iv) an first IgG1 CH3 domain comprising T366S, L368A, and Y407V mutations;
[0198] (v) a first disulfide bridge motif (KSCDKT) (SEQ ID NO: 167);
[0199] (vi) a Tandem Fc linker, optionally a linker comprising the aa sequence (G₄S)₈ (SEQ ID NO: 491);
[0200] (vii) an IgG4 middle and lower hinge;
[0201] (viii) a second IgG4 CH2 domain comprising a T299D mutation;
[0202] (ix) a second IgG1 CH3 domain comprising a T366W mutation;
[0203] (x) a second disulfide bridge motif (GEC) (SEQ ID NO: 168);
[0204] (xi) a connecting linker; and
[0205] (xii) the scFv.

[0206] A4′. The TFcBA of any of embodiments A1′-A3′ wherein the TFcBA exhibits a Kd for binding to cMET of less than about 10e-8, 10e-9, 10e-10, 10e-11, 10e-12, or 10e-13 M.

[0207] A5′. The TFcBA of embodiment A4′ wherein the TFcBA exhibits a Kd for binding to cMET of from 3.0×10e-8 to 2.5×10e-9 M.

[0208] A6′. The TFcBA of any of embodiments A1′-A3′ wherein the TFcBA exhibits a Kd for binding to EpCAM of less than about 10e-7 or 10e-8, or optionally 10e-9 M.

[0209] A7′. The TFcBA of embodiment A6′ wherein the TFcBA exhibits a Kd for binding to cMET of from 10e-8 to 10e-11 M.

[0210] A8′. The TFcBA of any of embodiments A1′-A3′ wherein a TFc linker sequence comprises an amino acid sequence of SEQ ID NO:169.

[0211] A9′. The TFcBA of any of embodiments A1′-A3′ wherein the TFc comprises an amino acid sequence selected from the group consisting of SEQ ID NO:171, SEQ ID NO:173, SEQ ID NO:175, SEQ ID NO:177, SEQ ID NO:179, SEQ ID NO:181, SEQ ID NO:183, SEQ ID NO:185, SEQ ID NO:187, SEQ ID NO:189, SEQ ID NO:191, SEQ ID NO:193 and SEQ ID NO:195.

[0212] A10′. A TFcBA molecule comprising a large chain comprising an amino acid sequence that is SEQ ID NO 489.

[0213] A11′. A method of treating a cancer patient, the method comprising administering to the patient a therapeutically effective amount of the TFcBA of any one of the preceding embodiments to the patient and optionally wherein the therapeutically effective amount is from 100 ng/kg of patient body weight to 15 mg/kg of patient body weight, and further optionally wherein the therapeutically effective amount is from 1 mg/kg patient body weight to 25 mg/kg patient body weight.

[0214] A12′. The method of embodiment A11′, wherein the cancer is a type of cancer disclosed herein and optionally wherein the therapeutically effective amount is from 1 mg/kg of patient body weight to 10 mg/kg of patient body weight.

[0215] A13′. A method of inhibiting tumor growth in a cancer patient, the method comprising administering to the patient a therapeutically effective amount of a TFcBA of any one of the embodiments A1′ to A10′ to the patient, optionally wherein the therapeutically effective amount is from 100 ng/kg of patient body weight to 15 mg/kg of patient body weight, from 1 mg/kg of patient body weight to 10 mg/kg of patient body weight, or from 1 mg/kg of patient body weight to 25 mg/kg of patient body weight.

[0216] A14′. A method of inhibiting tumor cell proliferation, the method comprising contacting a tumor cell with a fluid comprising a concentration of a TFcBA of any one of the embodiments A1′ to A10′, which concentration of the TFcBA is effective to inhibit proliferation of the tumor cells.

[0217] A15′. A pharmaceutical formulation comprising the TFcBA of any one of embodiments A1′ to A10′ and a pharmaceutical carrier.

[0218] A16′. The pharmaceutical formulation of embodiment A15′, wherein the formulation is a sterile formulation suitable for injection, intraveneous injection and/or infusion.

[0219] A17′. The pharmaceutical formulation of embodiment A15′ or embodiment A16′, wherein the formulation is packaged in a pharmaceutically acceptable container.

[0220] A18′. A nucleic acid molecule encoding a protein amino acid sequence of any of embodiments A1′ to A10′.

[0221] A19′. A vector comprising the nucleic acid molecule of embodiment A18′.

[0222] A20′. A host cell comprising a vector comprising the nucleic acid molecule of embodiment A18′.

[0223] A21′. The host cell of embodiment A20′ wherein the host cell expresses the encoded protein.

[0224] A22′. The TFcBA of any of embodiments A1-10′ wherein, when the TFcBA is contacted with cells expressing both cell surface c-Met and cell surface EPCAM, the amount of total c-Met measured in the cells subsequent to contact is lower than the amount of total c-Met measured in matched cells prior to contact.

[0225] A23′. The TFcBA of embodiment A22′, wherein, when the TFcBA is contacted with cells expressing both cell surface c-Met and cell surface EPCAM, the amount of total EPCAM measured in the cells is essentially unchanged.

### BRIEF DESCRIPTION OF THE DRAWINGS

[0226] FIG. 1A and FIG. 1B: Diagram of an exemplary anti-c-Met/anti-EGFR Tandem Fc Bispecific Antibody (“TFcBA”) (FIG. 1A) and exemplary mutations in each of the domains of the Tandem Fc (“TFc”) (FIG. 1B).

[0227] FIG. 1A: Diagram of an exemplary anti-c-Met/anti-EGFR TFcBA comprising the following three modules in amino to carboxyl terminal order: 1) a first module consisting of an anti-c-Met binding site; 2) a second module consisting of a TFc; and 3) a third module consisting of an anti-EGFR binding site. In the exemplified TFcBA, the first module is an anti-c-Met Fab and the third module is an anti-EGFR scFv. The TFc comprises two Fc regions that are linked through a TFc linker. In the exemplified TFcBA, the first Fc region comprises a full length IgG1/IgG4 hybrid hinge, an IgG4 CH2 domain, and an IgG1 CH3 domain, and the second Fc region comprises the core and lower hinge of IgG4 (but does not comprise an upper hinge), an IgG4 CH2 domain and an IgG1 CH3 domain. In the exemplified TFcBA, the CH3 domain comprises one or more Association Enhancing Modifications (“AEMs”), which enhance the association between two CH3 domains or two Fc regions. TFcBAs may also comprise one or more disulfide bond forming modifications (“DiSs”), which introduce cysteines allowing for the formation of disulfide bonds between two Fc regions.

[0228] FIG. 1B: Diagram of the structure of a TFc showing in amino to carboxyl terminal order: the first hinge, the first CH2 domain, the first CH3 domain, the TFc linker, the second hinge, the second CH2 domain and the second CH3 domain. Exemplary sequences and domain modifications for each of these domains are shown below the diagram. The name of the first or second CH3 modification in each AEM or DiS is indicated in parenthesis after the name of the modification, wherein the first numeral after “AEM” or “DiS” refers to the module number of the AEM or DiS, respectively, and the second numeral refers to the first or the second of the two CH3 domains. For example, “AEM 1.1” is indicated after the substitutions “T366S/L368A/Y407V,” which substitutions are the combination of substitutions in one of the two CH3 domains of a pair of modifications in AEM module 1. A TFc may comprise any combination of each of these domains, with the proviso that when one of the CH3 domain of the TFc comprises one of the two modifications of an AEM and/or DiS, the other CH3 domain comprises the second, i.e., compatible, modification(s) of the AEM and/or DiS. For example, if one CH3 domain of a TFc comprises AEM 1.1, the other CH3 domain comprises AEM 1.2. “C-term. Cys” refers to a modification adding a C-terminal Cysteine to the CH3 domain by substituting the last three aas of the CH3 domain with those shown in the Figure. Aa residue numbers in this Figure and the other Figures are those in an intact antibody heavy chain, according to the EU index in Kabat. Figures discloses the “(G4S)ₙ” linkers as SEQ ID NOS 497-499 and 491, respectively, in order of appearance, and “KSCDKT” and “GEC” as SEQ ID NOS 167 and 168, respectively.

[0229] FIG. 2: Alignment of aa sequences of wild type and variant hinges. A dash “-” at a position represents an aa that is identical to that in the first line of the figure at that position. A) Aa sequences of full length (SEQ ID NOs:4, 18 and 19) or partial (SEQ ID NOs:1, 2, 3, 16, 17, 23 and 263-265) IgG1 hinges that are wild type (SEQ ID NOs:1-4 and 23) or modified (SEQ ID NOs:16-19 and 263-265). B) Aas of full length (SEQ ID NOs:20, 21 and 22) or partial (SEQ ID NOs:1, 13, 14 and 24) IgG1/IgG4 hybrid hinges that are wild type (SEQ ID NOs:1, 13, 14, 20 and 24) or modified (SEQ ID NOs:21 and 22). C) Aa sequences of full length wild type mIgG1 hinge (SEQ ID NO:266) and hybrid mIgG1/mIgG2A hinge (SEQ ID NO:267). D) Aa sequence of a full length, wild type hIgG2 hinge (SEQ ID NO:7) and modified hIgG2 hinges (SEQ ID NOs:268 and 269). E) Aa sequence of a full length wild type hIgA2 hinge (SEQ ID NO:270) and modified hIgA2 hinges (SEQ ID NOs:271-273).

[0230] FIG. 3: Alignment of IgG1 CH3 aa sequences with or without various aa modifications. Each line is the aa sequence of a different CH3 domain. A dash “-” at a position represents an aa that is identical to that in the first line of the figure at that position. The CH3 modifications are organized according to their module, e.g., AEM module 1. Each module is divided into two groups labeled with two numerals: for example, AEM module 1 is divided into the groups “AEM 11” and “AEM 12,” wherein AEM 11 represents the modifications made to one CH3 domain (domain “1”) of module AEM 1 and AEM 12 represents the modifications made to the second CH3 domain (domain “2”) of the module. Each line within a module represents a CH3 domain having the modifications of the module with or without other modifications. The CH3 aa sequences within one module differ from each other, e.g., in the presence or absence of the carboxyl terminal lysine and/or in the presence of the substitutions D356E and L358M.

[0231] FIG. 4: Alignment of exemplary IgG1 Fc regions. Each line is the aa sequence of a different Fc region. A dash “-” at a position represents an aa that is identical to that in the first line of the figure at that position. Each Fc region comprises a hinge (boldface in first sequence), CH2 and CH3 domain (the CH3 domain is underlined in the first sequence). The SEQ ID NOs of the hinge, CH2 and CH3 sequences of each Fc in this Figure are provided in Table 8. The Fcs are organized in pairs, which are separated form other pairs by lines, and wherein each pair represents compatible Fcs, i.e., Fcs that can associate with each other to form an Fc dimer.

[0232] FIG. 5: Alignment of exemplary IgG1/IgG4 hybrid Fc regions. Each line is the aa sequence of a different Fc region. A dash “-” at a position represents an aa that is identical to that in the first line of the figure at that position. Each Fc region comprises a hinge (boldface in the first sequence), CH2 and CH3 domain (the CH3 domain is underlined in the first sequence). The SEQ ID NOs of the hinge, CH2 and CH3 sequences of each Fc in this Figure are provided in Table 9. The Fcs are organized in pairs, which are separated form other pairs by lines, and wherein each pair represents compatible Fcs, i.e., Fcs that can associate with each other to form an Fc dimer.

[0233] FIG. 6: Aa sequences of the following IgG1 TFcs: 23 (SEQ ID NO:171); 23A (SEQ ID NO:173); 23B (SEQ ID NO:175); 23C (SEQ ID NO:177); 23D (SEQ ID NO:179); 23E (SEQ ID NO:181); 23F (SEQ ID NO:183); 23E (35L) (SEQ ID NO:185); 23E (35L Inverted) (SEQ ID NO:187); 23E (30L) (SEQ ID NO:189); 23E (25L) (SEQ ID NO:191); 231 (SEQ ID NO:193); and 23J (SEQ ID NO:195). Each of these sequences consists of the following domains in amino to carboxyl terminal order: a first IgG1 hinge (double underlined), an IgG1 CH2 domain, an IgG1 CH3 domain (underlined), a (G4S)ₙ linker (SEQ ID NO: 492) (in italics), a second IgG1 hinge (doubly underlined, and consisting of the core and lower hinges only), a second IgG1 CH2 domain and a second IgG1 CH3 domain (underlined). The aa changes that are specific to each of these molecules are shown in boldface, and are named above the sequence. Figure discloses “KSCDKT,” “GEC,” “(G45)4,” “(G45)7,” “(G45)6” and “(G4S)5” as SEQ ID NOS 167, 168, 496, 499, 498 and 497, respectively.

[0234] FIG. 7: Aa sequences of the following IgG1/IgG4 hybrid TFcs: 39 (SEQ ID NO:197); 39A (SEQ ID NO:199); 39B (SEQ ID NO:201); 39C (SEQ ID NO:203); 39D (SEQ ID NO:205); 39E (SEQ ID NO:207); 39F (SEQ ID NO:209); 39E (35L) (SEQ ID NO:211); 39 E (35L Inverted) (SEQ ID NO:213); 39E (30L) (SEQ ID NO:215); 39E (25L) (SEQ ID NO:217); 391 (SEQ ID NO:219); 39J (SEQ ID NO:221). Each of these sequences consist of the following domains in amino to carboxyl terminal order: a first IgG1/IgG4 hybrid hinge consisting of the IgG1 upper hinge and IgG4 core and lower hinges (double underlined), an IgG4 CH2 domain, an IgG1 CH3 domain (underlined), a (G4S)ₙ linker (SEQ ID NO: 492) (in italics), a second IgG4 hinge (double underlined, and consisting of the core and lower hinges only), a second IgG4 CH2 domain and a second IgG1 CH3 domain (underlined). The IgG1 sequences are in upper case letters and the IgG4 sequences are in lower case letters. The aa changes that are specific to each of these molecules are shown in boldface, and are named above the sequence. Figure discloses “KSCDKT,” “GEC,” “(G4S)4,” “(G4S)7,” “(G4S)6” and “(G4S)5” as SEQ ID NOS 167, 168, 496, 499, 498 and 497, respectively.

[0235] FIG. 8: Samples of TFcs 23A, 23B, 23D, 23E, 39B and 39G separated on a 4-12% SDS-PAGE gel under A) non reducing or B) reducing conditions. Molecular weights (in kilodaltons) of the molecular weight markers (Biorad Precision Plus Marker) of lane 1 are shown on the left of the gel.

[0236] FIG. 9: Aa sequences of heavy chains of the following exemplary anti-c-Met/anti-EGFR TFcBAs: TFcBAs comprising a humanized 5D5 VH domain and an anti-EGFR scFv comprising the aa sequences of the VH and VL domains of A), B), C), D) E), L) and M) panimumumab (SEQ ID NO:235); F) 2224 (SEQ ID NO:239); G) cetuximab H1L1(SEQ ID NO:260); H) cetuximab H1L2 (SEQ ID NO:281); I) cetuximab H2L1 (SEQ ID NO:283); and J) cetuximab H2L2 (SEQ ID NO:285). K) aa sequence of the heavy chain of anti-c-Met/anti-EGFR TFcBA comprising the VH domain of anti-c-Met binding site 2 and humanized anti-EGFR cetuximab scFv H1L1. The aas that were introduced into the cetuximab VH domains for humanization purposes are indicated in lower case. The CDRs of the anti-c-Met Fab are underlined with a dotted line. The CH1 domain is underlined with a wavy line. The hinges are double underlined. The TFc linker is in italics. The CH3 domains are underlined. The AEM and DiS modifications in the CH3 domains are in boldface. The scFv linker is in italics and underlined. The connecting linker is in italics and double underlined.

[0237] FIG. 10: Nucleotide sequences encoding the aa sequences set forth in the Figures and in the specification. Figure discloses “G4S” as SEQ ID NO: 492.

[0238] FIG. 11: Nucleotide and aa sequences of TFcs used in Examples 1 and 2. Each of the aa sequences consists of the following domains in amino to carboxyl terminal order: a signal peptide (underlined and boldface), a first IgG1 hinge (double underlined), an IgG1 CH2 domain, an IgG1 CH3 domain (underlined), a TFc linker (in italics), a second IgG1 hinge (doubly underlined, and consisting of the core and lower hinges only), a second IgG1 CH2 domain and a second IgG1 CH3 domain (underlined). IgG1 aas are in upper case and IgG4 aas are in lower case. The aa changes that are specific to each of these molecules, e.g., AEMs and DiSs modifications, are shown in boldface, and are named above the sequence. Figure discloses “KSCDKT,” “GEC,” “(G4S)4,” “(G4S)7,” “(G4S)6” and “(G4S)5” as SEQ ID NOS 167, 168, 496, 499, 498 and 497, respectively.

[0239] FIG. 12A: Selection of onartuzumab (OTZM) monoclonal cell line: Lane 1=size standards, Lanes 2-12; 2=OTZM line 1, 3=OTZM line 2, 4=OTZM line 3, 5=OTZM line 4, 6=OTZM line 5, 7=OTZM line 6, 8=OTZM line 7, 9=OTZM line 8, 10=OTZM line 9, 11=OTZM line 10, 12=OTZM line 11.

[0240] FIG. 12B: Selection of onartuzumab (OTZM) monoclonal cell line: Lane 1=size standards Lanes 2-9; 2=OTZM line 12, 3=OTZM line 13, 4=OTZM line 14, 5=OTZM line 15, 6=OTZM line 16, 7=OTZM line 17, 8=OTZM line 18, 9=OTZM line 19.

[0241] FIG. 13A: Non-reduced SDS-PAGE of charged glycosylation mutants: Lane 1=size standards, Lanes 2-8; 2=glyco wt, 3=glyco 1, 4=glyco 2, 5=glyco 3, 6=glyco 4, 7=glyco 5, 8=glyco 6.

[0242] FIG. 13B: Reduced SDS-PAGE of charged glycosylation mutants: Lane 1=size standards, Lanes 2-8; 2=glyco wt, 3=glyco 1, 4=glyco 2, 5=glyco 3, 6=glyco 4, 7=glyco 5, 8=glyco 6.

[0243] FIG. 14: Nucleotide and aa sequences of exemplary TFcBAs.

[0244] FIG. 15: A graph showing binding to cMet-Fc and EGFR-his of TFcBAs comprising the 39E glycoform 4 backbone, onartuzumab antibody and either 2224 or panitumumab antibody.

[0245] FIG. 16: A graph showing inhibition of pMet by TFcs comprising onartuzumab antibody and various backbones including 23, 23E, 39, 39E glycoform 4 backbone, and including TFcBAs comprising 39E glycoform 4 backbone and 2224, cetuximab, or panitumumab antibody.

[0246] FIG. 17: Nucleotide and aa sequences of glycosylation mutants of the exemplary TFcBAs set forth in Table 23. Figure discloses “KSCDKT” and “GEC” as SEQ ID NOS 167 and 168, respectively.

[0247] FIG. 18: Diagram of an exemplary anti-c-Met/anti-EpCam Tandem Fc Bispecific Antibody (“TFcBA”). In an embodiment, the CH2 domain may comprise an electrostatic region such as a complementarity region. Figure discloses “(G₄S)₈” as SEQ ID NO: 491.

[0248] FIG. 19: Table showing structural characteristics of anti-c-Met/anti-EpCam Tandem Fc Bispecific Antibodies Ab#1-Ab#13.

[0249] FIG. 20: SDS gel of variants of antibody OA-5D5 (IgGs).

[0250] FIG. 21: SDS gel of anti-c-Met/anti-EpCam Tandem Fc Bispecific Antibodies Ab#5, Ab#7, and Ab#13.

[0251] FIG. 22: Bispecific binding assay data obtained with anti-c-Met/anti-EpCam Tandem Fc Bispecific Antibodies Ab#5, Ab#7, and Ab#13.

[0252] FIG. 23: Comparison of Met phosphorylation induced by incubation with monovalent (OA-5D5), bivalent anti-c-Met antibodies, HGF, or media only control.

[0253] FIG. 24: Comparison of Met phosphorylation induced by incubation of A549 cells with monovalent (OA-5D5), bivalent anti-c-Met antibodies, HGF, anti-c-Met/anti-EpCam Tandem Fc Bispecific Antibodies Ab#5, Ab#7, or Ab#13, or media only control.

[0254] FIG. 25A: Comparison of proliferation induced by incubation of A549 cells with HGF, fetal bovine serum (FBS), and anti-c-Met/anti-EpCam Tandem Fc Bispecific Antibodies Ab#5, Ab#7, or Ab#13.

[0255] FIG. 25B: Comparison of proliferation induced by incubation of H441 cells with HGF, fetal bovine serum (FBS), and anti-c-Met/anti-EpCam Tandem Fc Bispecific Antibodies Ab#5, Ab#7, or Ab#13.

[0256] FIG. 25C: Comparison of proliferation induced by incubation of HCC827 cells with HGF, fetal bovine serum (FBS), and anti-c-Met/anti-EpCam Tandem Fc Bispecific Antibodies Ab#5, Ab#7, or Ab#13.

[0257] FIG. 26: Comparison of inhibition of HGF-induced phosphorylation of AKT by monovalent anti-c-Met antibody OA-5D5, and anti-c-Met/anti-EpCam Tandem Fc Bispecific Antibodies Ab#5, Ab#7, and Ab#13 in A549 cells and NCI-H2170 cells.

[0258] FIG. 27: Comparison of inhibition of HGF-induced proliferation by monovalent anti-c-Met antibody OA-5D5, and anti-c-Met/anti-EpCam Tandem Fc Bispecific Antibody Ab#5 in U-87 MG cells and H441 cells.

[0259] FIG. 28: Comparison of inhibition of HGF-induced proliferation by monovalent anti-c-Met antibody OA-5D5, and anti-c-Met/anti-EpCam Tandem Fc Bispecific Antibody Ab#7 in A549 cells and H441 cells.

[0260] FIG. 29: Downregulation of cMet levels in A549 cells and H2170 cells by anti-c-Met/anti-EpCam Tandem Fc Bispecific Antibody AB#5 but not by monovalent anti-c-Met antibody OA-5D5.

[0261] FIG. 30A: Murine pharmacokinetics—terminal half life of anti-c-Met/anti-EpCam Tandem Fc Bispecific Antibody Ab#5.

[0262] FIG. 30B: Murine pharmacokinetics—terminal half life of anti-c-Met/anti-EpCam Tandem Fc Bispecific Antibody Ab#7.

[0263] FIG. 30C: Murine pharmacokinetics—terminal half life of anti-c-Met/anti-EpCam Tandem Fc Bispecific Antibody Ab#13.

[0264] FIG. 31: illustrates the results of testing the effect of an agent on tumor volume over time. Anti-c-Met/anti-EpCam Tandem Fc Bispecific Antibody Ab#7 and monovalent anti-c-Met antibody OA-5D5 each reduce U87 MG cell xenograft tumor growth in nude mice and cause tumor regression. Both Ab#7 and OA-5D5 were able to demonstrate regression of subcutaneously implanted U-87 MG tumors to a similar extent.

[0265] FIG. 32 is a graph showing results of dose-response analysis of antibody activity on U-87 MG tumors implanted into nude mice, as measured by post-implantation tumor volume. U-87 MG tumors were implanted subcutaneously and the mice were treated weekly with PBS control or Ab#7 at 1 mg/kg, 4 mg/kg, 12 mg/kg, or 24 mg/kg. The results show that AB#7 produces a reduction in tumor volume with a dose response correlation: increasing doses of Ab#7 yield increasing degrees of reduction of tumor volume.

[0266] FIG. 33 is a bar graph showing results of quantification of secreted HGF from tumor cells. HGF was measured in supernatants from U-87 MG cells, NCI-H358 cells (“parental”), NCI-H358 mock-transfected cells, and NCI-H358 cells transfected with HGF and normalized against total protein.

[0267] FIG. 34 is a graph showing results of dose-response analysis of antibody activity on HGF ligand-dependent HCC827-HGF tumors implanted into nude mice, as measured by post-implantation tumor volume. After tumor growth, mice were treated weekly with PBS control, Ab#7 at 1 mg/kg, 4 mg/kg, 12 mg/kg (equimolar to 10 mg/kg OA-5D5), or 25 mg/kg, or 10 mg/kg OA-5D5. Results show that Ab#7 causes greater reductions in tumor volume than does and equimolar amount of OA-5D5.

[0268] FIG. 35 is a graph showing results of antibody activity on HGF ligand-dependent H358-HGF tumors implanted into nude mice, as measured by post-implantation tumor volume. After tumor growth, mice were treated weekly with PBS control, Ab#7 at 12 mg/kg (equimolar to 10 mg/kg OA-5D5), or 10 mg/kg OA-5D5. Results show that Ab#7 causes greater reductions in tumor volume than does and equimolar amount of OA-5D5.

[0269] FIG. 36 provides five graphs showing protein quantitation after immunoblot analysis of c-Met and EpCAM degradation in cell lysates after treatment with bispecific antibodies. Protein was measured in cells treated with medium only, 200 nM OA-5D5, and 200 nM Ab#7. Part (A) shows quantification of c-Met in A549 cells; EpCAM was undetectable in this cell line in this experiment. Part (B) shows quantitation of c-Met in NCI-H441 cells and (D) shows quantitation of EpCAM in NCI-H441 cells. Part (C) shows quantitation of c-Met in NCI-H2170 cells and (E) shows quantitation of EpCAM in NCI-H2170 cells. Results show that Ab#7, but not OA-5D5, induces degradation of total c-Met in NCI-H441 and NCI-H2170 cells, but not in A549 cells, while none of these antibodies induced reductions in EPCAM levels in any of these cell lines.

### BRIEF DESCRIPTION OF THE SEQUENCES

[0270] The amino acid (“aa”) sequences referred to herein and listed in the sequence listing are identified below.

[0271] SEQ ID NOs:1, 2 and 3 are the aa sequences of the wild type IgG1 upper, middle (or core) and lower hinge, respectively (see Table 2).

[0272] SEQ ID NO:4 is the aa sequence of the complete wild type IgG1 hinge, consisting of SEQ ID NOs:1, 2 and 3 in a contiguous sequence in amino to carboxyl terminal order (see Table 2).

[0273] SEQ ID NOs:5 and 6 are the aa sequences of the wild type IgG2 upper and lower hinge, respectively (see Table 2). The IgG2 middle hinge is the same as that of IgG1, i.e., SEQ ID NO:2.

[0274] SEQ ID NO:7 is the aa sequence of the complete wild type IgG2 hinge, consisting of SEQ ID NOs:5, 2 and 6 in a contiguous sequence in amino to carboxyl terminal order (see Table 2).

[0275] SEQ ID NOs:8, 9 and 10 are the aa sequences of the wild type IgG3 upper, middle and lower hinge, respectively (see Table 2).

[0276] SEQ ID NO:11 is the aa sequence of the complete wild type IgG3 hinge, consisting of SEQ ID NOs:8, 9 and 10 in a contiguous sequence in amino to carboxyl terminal order (see Table 2).

[0277] SEQ ID NOs:12, 13 and 14 are the aa sequences of the IgG4 upper, middle and lower hinge, respectively (see Table 2).

[0278] SEQ ID NO:15 is the aa sequence of a full length IgG4 hinge, consisting of SEQ ID NOs:12, 13 and 14 in a contiguous sequence in amino to carboxyl terminal order (see Table 2).

[0279] SEQ ID NO:16 is the aa sequence of the IgG1 upper hinge (SEQ ID NO:1) comprising the aa substitutions H224C and T225C (see Table 4 and FIG. 2).

[0280] SEQ ID NO:17 is the aa sequence of the IgG1 upper hinge (SEQ ID NO:1) comprising the aa substitution T223C (see Table 4 and FIG. 2).

[0281] SEQ ID NO:18 is the aa sequence of the full length IgG1 hinge (SEQ ID NO:4) comprising the aa substitutions H224C and T225C (see Table 4 and FIG. 2).

[0282] SEQ ID NO:19 is the aa sequence of the full length IgG1 hinge (SEQ ID NO:4) comprising the aa substitution T223C (see Table 4 and FIG. 2).

[0283] SEQ ID NO:20 is the aa sequence of a full length hybrid IgG1/IgG4 hinge, consisting of the upper hinge of IgG1 (SEQ ID NO:1) and the middle and lower hinges of IgG4 (SEQ ID NOs:13 and 14, respectively; see Table 4 and FIG. 2).

[0284] SEQ ID NO:21 is the aa sequence of a full length hybrid IgG1/IgG4 hinge, consisting of the upper hinge of IgG1 comprising the aa substitutions H224C and T225C (SEQ ID NO:16) and the middle and lower hinges of IgG4 (SEQ ID NOs:13 and 14, respectively; see Table 4 and FIG. 2).

[0285] SEQ ID NO:22 is the aa sequence of a full length hybrid IgG1/IgG4 hinge, consisting of the upper hinge of IgG1 comprising the aa substitution T223C (SEQ ID NO:17) and the middle and lower hinges of IgG4 (SEQ ID NOs:13 and 14, respectively; see Table 4 and FIG. 2).

[0286] SEQ ID NO:23 is the aa sequence of a partial IgG1 hinge comprising the middle and lower IgG1 hinges (SEQ ID NOs:2 and 3), but not the upper hinge (see Table 4 and FIG. 2).

[0287] SEQ ID NO:24 is the aa sequence of a partial IgG4 hinge comprising the middle and lower IgG4 hinges (SEQ ID NOs:13 and 14), but not the upper hinge (see Table 4 and FIG. 2).

[0288] SEQ ID NO:25 is the aa sequence of a full length IgG1 CH2 domain with the aa substitution N297Q reducing glycosylation at aa 297.

[0289] SEQ ID NO:26 is the aa sequence of a full length wild type IgG4 CH2 domain with the aa substitution T299K reducing glycosylation at aa 297.

[0290] SEQ ID NO:27 is the aa sequence of a full length wild type human IgG1 CH3 domain (see Table 6 and FIG. 3).

[0291] SEQ ID NO:28 is the aa sequence of the wild type IgG1 CH3 domain having SEQ ID NO:27, but lacking the C-terminal lysine (see Table 6 and FIG. 3).

[0292] SEQ ID NO:29 is the aa sequence of the IgG1 CH3 domain having SEQ ID NO:27 with the substitutions D356E and L358M (see Table 6 and FIG. 3).

[0293] SEQ ID NO:30 is the aa sequence of the IgG1 CH3 domain having SEQ ID NO:29, lacking the C-terminal lysine (see Table 6 and FIG. 3).

[0294] SEQ ID NO:31 is the aa sequence of the IgG1 CH3 domain having SEQ ID NO:27 with the substitutions T366S, L368A and Y470V, creating a “hole” (Association Enhancing Modification or “AEM” 1.1; see Table 6 and FIG. 3).

[0295] SEQ ID NO:32 is the aa sequence of the IgG1 CH3 domain having SEQ ID NO:31, lacking the C-terminal lysine (see Table 6 and FIG. 3).

[0296] SEQ ID NO:33 is the aa sequence of the IgG1 CH3 domain having SEQ ID NO:29 with the substitutions T366S, L368A and Y470V, creating a “hole” (AEM 1.1; see Table 6 and FIG. 3).

[0297] SEQ ID NO:34 is the aa sequence of the IgG1 CH3 domain having SEQ ID NO:33, lacking the C-terminal lysine (see Table 6 and FIG. 3).

[0298] SEQ ID NO:35 is the aa sequence of the IgG1 CH3 domain having SEQ ID NO:27 with the substitution T366W, creating a “bump” or “knob” (AEM 1.2; see Table 6 and FIG. 3).

[0299] SEQ ID NO:36 is the aa sequence of the IgG1 CH3 domain having SEQ ID NO:35, lacking the C-terminal lysine (see Table 6 and FIG. 3).

[0300] SEQ ID NO:37 is the aa sequence of the IgG1 CH3 domain having SEQ ID NO:29 with the substitution T366W, creating a “bump” or “knob” (AEM 1.2; see Table 6 and FIG. 3).

[0301] SEQ ID NO:38 is the aa sequence of the IgG1 CH3 domain having SEQ ID NO:37, lacking the C-terminal lysine (see Table 6 and FIG. 3).

[0302] SEQ ID NOs:39-98 are the aa sequences of IgG1 CH3 domains comprising one or more AEM and/or Disulfide bond forming (“DiS”) modifications relative to IgG1 CH3 having SEQ ID NO:27, 28, 29 or 30 (see Table 6 and FIG. 3).

[0303] SEQ ID NOs:99-132 are the aa sequences of exemplary IgG1 Fc regions comprising in a contiguous amino to carboxyl terminal order: (a) a hinge selected from the group consisting of an IgG1 hinge, an IgG1 hinge comprising one or more aa substitutions, and a partial IgG1 hinge; (b) an IgG1 CH2 domain with N297Q (SEQ ID NO:25); and (c) an IgG1 CH3 domain selected from the group consisting of SEQ ID NO:29 and SEQ ID NO:29 comprising one or more AEM and/or DiS modifications (FIG. 4). The hinge, CH2 and CH3 domains are covalently linked without intervening sequences. The SEQ ID NOs of each of the domains of SEQ ID NOs:99-132 are set forth in Table 8.

[0304] SEQ ID NOs:133-166 are the aa sequences of exemplary IgG1/IgG4 hybrid Fc regions comprising in a contiguous amino to carboxyl terminal order: (a) a hinge selected from the group consisting of an IgG1/IgG4 hybrid hinge, an IgG1/IgG4 hybrid hinge comprising one or more aa substitutions, and a partial IgG4 hinge; (b) an IgG4 CH2 domain with T299K (SEQ ID NO:26); and (c) an IgG1 CH3 domain selected from the group consisting of SEQ ID NO:29 and SEQ ID NO:29 comprising one or more AEM and/or DiS modifications. The hinge, CH2 and CH3 domains are covalently linked without intervening sequences. The SEQ ID NOs of each of the domains of SEQ ID NOs:133-166 are set forth in Table 9.

[0305] SEQ ID NO:167 is KSCDKT, which is an exemplary modified carboxyl terminal portion of an IgG1 CH3 domain that introduces a cysteine.

[0306] SEQ ID NO:168 is GEC, which is an exemplary modified carboxyl terminal portion of an IgG1 CH3 domain that introduces a cysteine.

[0307] SEQ ID NO:169 is the aa sequence of an exemplary non Gly-Ser TFc linker SEQ ID NOs:170-195 are nucleotide sequences (even numbers) and aa sequences (odd numbers) of exemplary IgG1 TFcs, which are set forth in FIG. 6. The SEQ ID NOs of the domains that constitute each of these IgG1 TFcs is set forth in Table 12.

[0308] SEQ ID NOs:196-221 are nucleotide sequences (even numbers) and aa sequences (odd numbers) of exemplary TFcs comprising hybrid IgG1/IgG4 Fc regions, which are set forth in FIG. 7. The SEQ ID NOs of the domains that constitute each of these hybrid TFcs is set forth in Table 13.

[0309] SEQ ID NOs:222-223 are the nucleotide and aa sequences, respectively, of the heavy chain Fab domain of anti-c-Met Ab 5D5, without signal peptide.

[0310] SEQ ID NOs:224-225 are the nucleotide and aa sequences, respectively, of the heavy chain of an IgG1 TFcBA comprising the anti-c-Met 5D5 VH domain, an IgG1 TFc (with AEM 1), and the panitumumab scFv (FIG. 9).

[0311] SEQ ID NOs:226-227 are the nucleotide and aa sequences, respectively, of the heavy chain of an IgG1/IgG4 hybrid TFcBA comprising the anti-c-Met 5D5 VH domain, an IgG1/IgG4 hybrid TFc (with AEM 1), and the panitumumab scFv (FIG. 9).

[0312] SEQ ID NOs:228-229 are the nucleotide and aa sequences, respectively, of the heavy chain of an IgG1/IgG4 hybrid TFcBA comprising the anti-c-Met 5D5 VH domain, an IgG1/IgG4 hybrid TFc (with AEM 1), and the panitumumab scFv (FIG. 9).

[0313] SEQ ID NOs:230 and 231 are the nucleotide and aa sequences, respectively, of a light chain comprising humanized 5D5 anti-c-Met VL domain and CL domain, for use, e.g., with a heavy chain comprising the humanized 5D5 anti-c-Met VH domain, e.g., a heavy chain comprising SEQ ID NO: 225, 227, 229, 244, or 343.

[0314] SEQ ID NOs:232 and 233 are the nucleotide and aa sequences of an anti-EGFR scFv comprising the variable regions of panitumumab (VECTIBIX).

[0315] SEQ ID NOs:234 and 235 are the nucleotide and aa sequences, respectively, shown in FIGS. 9 and 10, respectively, of the heavy chain of an anti-c-Met/anti-EGFR TFcBA comprising (a) the anti-c-Met variable domain from humanized 5D5; (b) a TFc with AEM 1 and DiS 2 (SEQ ID NO:181); and (c) an anti-EGFR scFv comprising the variable regions of panitumumab (VECTIBIX) (SEQ ID NO:233).

[0316] SEQ ID NOs:236 and 237 are the nucleotide and aa sequences, respectively, of an anti-EGFR scFv comprising the variable regions of Ab 2224.

[0317] SEQ ID NOs:238 and 239 are the nucleotide and aa sequences, shown in FIGS. 9 and 10, respectively, of the heavy chain of an anti-c-Met/anti-EGFR TFcBA comprising (a) the anti-c-Met variable domain from humanized 5D5; (b) a TFc with AEM 1 and DiS 2 (SEQ ID NO:181); and (c) an anti-EGFR scFv comprising the variable regions of Ab 2224 (SEQ ID NO:237).

[0318] SEQ ID NOs:240 and 241 are the nucleotide and aa sequences, respectively, of an exemplary signal peptide.

[0319] SEQ ID NOs:242 and 243 are the nucleotide and aa sequence, respectively, of an exemplary signal peptide.

[0320] SEQ ID NOs:244 and 245 are the nucleotide and aa sequences, respectively, of the anti-c-Met VH domain of 5D5 and CL domain with a signal peptide having SEQ ID NO:241.

[0321] SEQ ID NO:246 and 247 are the nucleotide and aa sequences of the light chain having SEQ ID NO:231 with a signal peptide having SEQ ID NO:243.

[0322] SEQ ID NOs:248-254 are the aa sequences of variant hinges described in the specification.

[0323] SEQ ID NO: 255 and 256 are the nucleotide and aa sequences, respectively, of the heavy chain Fab region of the anti-c-Met binding site 2 (SEQ ID NO:287) with the signal peptide consisting of SEQ ID NO:241 and shown in Example 3.

[0324] SEQ ID NOs:257 and 258 are the nucleotide and aa sequences, respectively, of an anti-EGFR scFv comprising the variable regions of humanized cetuximab H1L1.

[0325] SEQ ID NOs:259 and 260 are the nucleotide and aa sequences, shown in FIGS. 9 and 10, respectively, of the heavy chain of an anti-c-Met/anti-EGFR TFcBA comprising (a) the anti-c-Met variable domain from humanized 5D5; (b) a TFc with AEM 1 and DiS 2 (SEQ ID NO:181); and (c) an anti-EGFR scFv comprising the variable regions of humanized cetuximab H1L1 (SEQ ID NO:258).

[0326] SEQ ID NO:261 is the aa sequence of a full length wild type IgG1 CH2 domain.

[0327] SEQ ID NO:262 is the aa sequence of a full length wild type IgG4 CH2 domain.

[0328] SEQ ID NOs:263, 264 and 265 are aa sequences of variant hIgG1 hinges (FIG. 2).

[0329] SEQ ID NO:266 is the aa sequence of the wild type mouse IgG1 hinge (FIG. 2).

[0330] SEQ ID NO:267 is the aa sequence of a mouse IgG1/IgG2A hybrid hinge (FIG. 2).

[0331] SEQ ID NOs:268 and 269 are the aa sequences of variant hIgG2 hinges (FIG. 2).

[0332] SEQ ID NO:270 is the aa sequence of a wild type hIgA2 hinge (FIG. 2).

[0333] SEQ ID NOs:271-273 are aa sequences of variant hIgA2 hinges (FIG. 2).

[0334] SEQ ID NOs:274-279 are nucleotide (even numbers) and aa (odd numbers) sequences of scFvs comprising variable domains of humanized cetuximab Abs H1L2, H2L1 and H2L2, which are described in Example 3.

[0335] SEQ ID NOs:280-285 are nucleotide (even numbers) and aa (odd numbers) sequences of the heavy chain of an anti-c-Met/anti-EGFR TFcBA comprising (a) the anti-c-Met variable domain from humanized 5D5; (b) an anti-EGFR scFv comprising the variable regions of humanized cetuximab Abs H1L2, H2L1 and H2L2 (SEQ ID NO:275, 277 or 279, respectively); and (c) a TFc with AEM 1 and DiS 2 (SEQ ID NO:181) (FIG. 9).

[0336] SEQ ID NOs:286 and 287 are the nucleotide and aa sequences, respectively, of the heavy chain Fab domain of anti-c-Met binding site 2, which is described in Example 3.

[0337] SEQ ID NOs:288 and 289 are the nucleotide and aa sequences, respectively, of the light chain Fab domain of anti-c-Met binding site 2, which is described in Example 3.

[0338] SEQ ID NOs:290 and 291 are the nucleotide and aa sequences, shown in FIGS. 9 and 10, respectively, of the heavy chain of an anti-c-Met/anti-EGFR TFcBA comprising (a) the anti-c-Met heavy chain Fab domain from anti-c-Met binding site 2 (SEQ ID NO:287); (b) a TFc with AEM 1 and DiS 2 (SEQ ID NO:181); and (c) an anti-EGFR scFv comprising the variable regions of humanized cetuximab H1L1 (SEQ ID NO:258) (FIG. 9). The aa sequence of SEQ ID NO:291 is the same as that having SEQ ID NO:260, wherein the anti-c-Met binding domain has been replaced with that of the anti-c-Met binding site 2.

[0339] SEQ ID NOs: 292-341 are nucleotide (even numbers) and aa (odd numbers) sequences of TFcs used in Examples 1 and 2 and shown in FIG. 11.

[0340] SEQ ID NOs: 342 and 343 are the nucleotide and aa sequences, respectively, of the heavy chain of an IgG1 TFcBA comprising the anti-c-Met 5D5 VH domain, an IgG1 TFc (with AEM 1 and DiS inverted), and the panitumumab scFv (FIG. 9).

[0341] SEQ ID NO: 344 and 345 are the nucleotide and aa sequences, respectively, of the light chain Fab region of the anti-c-Met binding site 2 (SEQ ID NO:289) with the signal peptide consisting of SEQ ID NO:243 and shown in Example 3.

[0342] SEQ ID NOs: 346 and 347 are the nucleotide and aa sequences, respectively, of the heavy chain of anti-c-met/anti-EGFR TFcBA with humanized 5D5 anti-c-Met and anti-EGFR panitumumab scFv with IgG1 TFc (with AEM 1 and a 40aa TFc linker having SEQ ID NO:169; FIG. 9).

[0343] SEQ ID NOs: 348 and 349 are the nucleotide and aa sequences, respectively, of the heavy chain of anti-c-met/anti-EGFR TFcBA with humanized 5D5 anti-c-Met and anti-EGFR panitumumab scFv with IgG1/IgG4 hybrid TFc (with AEM 1 and a 40aa TFc linker having SEQ ID NO:169; FIG. 9).

[0344] SEQ ID NO: 350 is the aa sequence of the heavy chain of anti-RON/anti-EGFR TFcBA comprising an anti-RON heavy chain Fab domain, anti-EGFR scFv 2224, and TFc 23E (SEQ ID NO:303); FIG. 14.

[0345] SEQ ID NO: 351 is the aa sequence of the heavy chain of the anti-RON/anti-EGFR TFcBA comprising an anti-RON heavy chain Fab domain, anti-EGFR scFv 2224, and TFc 39Egy4 (39E glycoform 4) (SEQ ID NO: 394); FIG. 14.

[0346] SEQ ID NO: 352 is the aa sequence of the heavy chain of the anti-RON/anti-CEA TFcBA comprising an anti-RON heavy chain Fab domain, anti-CEA scFv, and Tfc 23E (SEQ ID NO: 303); FIG. 14.

[0347] SEQ ID NO: 353 is the aa sequence of the heavy chain of the anti-RON/anti-CEA TFcBA comprising an anti-RON heavy chain Fab domain, anti-CEA scFv, and TFc 39Egy4 (SEQ ID NO: 394); FIG. 14.

[0348] SEQ ID NO: 354 is the aa sequence of the heavy chain of the anti-CEA/anti-cMet TFcBA comprising an anti-CEA heavy chain Fab domain, anti-cMet scFv, and TFc 23E (SEQ ID NO: 303); FIG. 14.

[0349] SEQ ID NO: 355 is the aa sequence of the heavy chain of the anti-CEA/anti-RON TFcBA comprising an anti-CEA heavy chain Fab domain, anti-RON scFv, and TFc 23E (SEQ ID NO: 303); FIG. 14.

[0350] SEQ ID NO: 356 is the aa sequence of the heavy chain of the anti-CEA/anti-scMet TFcBA comprising an anti-CEA heavy chain Fab domain, anti-cMet scFv, and TFc 39Egy4 (SEQ ID NO: 394); FIG. 14.

[0351] SEQ ID NOs 357-358 are the aa sequence and nucleotide sequence of TFc wild-type CH2 sequence; and T366S/L368A/Y407V/CH3 C-terminal Cysteine KSCDKT::T366W/CH3 C-terminal Cysteine GEC in the CH3 domains; FIG. 17 (“KSCDKT” and “GEC” disclosed as SEQ ID NOS 167 and 168, respectively).

[0352] SEQ ID NO: 359 is the aa sequence of the heavy chain of the anti-cMet/anti-CEA TFcBA comprising an anti-cMet heavy chain Fab domain, anti-CEA scFv, and TFc 23E (SEQ ID NO: 303); FIG. 14.

[0353] SEQ ID NO: 360 is the aa sequence of the heavy chain of the anti-cMet/anti-CEA TFcBA comprising an anti-cMet heavy chain Fab domain, anti-CEA scFv, and TFc 39Egy4 (SEQ ID NO: 394); FIG. 14.

[0354] SEQ ID NO: 361 is the aa sequence of the heavy chain of the anti-cMet/anti-CEA CD44 comprising an anti-cMet heavy chain Fab, an anti-CD44 scFv, and TFc 39Egy4 (SEQ ID NO: 394); FIG. 14.

[0355] SEQ ID NO: 362 is the aa sequence of the heavy chain of the anti-cMet/anti-CEA CD44 comprising an anti-cMet heavy chain Fab domain, an anti-CD44 scFv, and TFc 23E (SEQ ID NO: 303); FIG. 14.

[0356] SEQ ID NO: 363 is the aa sequence of the heavy chain of the anti-cMet/anti-CEA CD44 comprising an anti-cMet heavy chain Fab domain, an anti-CD44 scFv, and TFc 23E (SEQ ID NO: 303); FIG. 14.

[0357] SEQ ID NO: 364 is the aa sequence of the heavy chain of the anti-cMet/anti-CEA CD44 comprising an anti-cMet heavy chain Fab domain, an anti-CD44 scFv, and TFc 39Egy4 (SEQ ID NO: 394), FIG. 14.

[0358] SEQ ID NO: 365 is the aa sequence of the heavy chain of the anti-CD44/anti-anti-cMet comprising an anti-CD44 heavy chain Fab domain, an anti-cMet scFv, and TFc 23E (SEQ ID NO: 303); FIG. 14.

[0359] SEQ ID NO: 366 is the aa sequence of the heavy chain of the anti-CD44/anti-cMet comprising an anti-CD44 heavy chain Fab domain, an anti-cMet scFv, and TFc 39Egy4 (SEQ ID NO: 394); FIG. 14.

[0360] SEQ ID NO: 367 is the aa sequence of the anti-CD44 ARH60-16-2 light chain.

[0361] SEQ ID NOs 368-369 are the aa sequence and nucleotide sequence of the anti-cMet antibody onartuzumab and TFc 23 light chain; FIG. 14.

[0362] SEQ ID NOs 370-371 are the aa sequence and nucleotide sequence of the anti-cMet antibody onartuzumab and TFc 39 heavy chain; FIG. 14.

[0363] SEQ ID NOs 372-373 are the aa sequence and nucleotide sequence of the anti-cMet antibody onartuzumab and TFc 23E heavy chain; FIG. 14.

[0364] SEQ ID NOs 374-375 are the aa sequence and nucleotide sequence of the anti-cMet antibody onartuzumab and TFc 39Egy4 heavy chain; FIG. 14.

[0365] SEQ ID NOs 376-377 are the aa sequence and nucleotide sequence of anti-cMet/anti-EGFR comprising an anti-cMet heavy chain Fab domain, the cetuximab anti-EGFR scFv, and TFc 23E (SEQ ID NO: 303); FIG. 14.

[0366] SEQ ID NOs 378-379 are the aa sequence and nucleotide sequence of anti-cMet/anti-EGFR comprising an anti-cMet heavy chain Fab domain, the panitumumab anti-EGFR scFv, and TFc 23E (SEQ ID NO: 303); FIG. 14.

[0367] SEQ ID NOs 380-381 are the aa sequence and nucleotide sequence of anti-cMet/anti-EGFR comprising an anti-cMet heavy chain Fab domain, the 2224 anti-EGFR scFv, and TFc 23E (SEQ ID NO: 303); FIG. 14.

[0368] SEQ ID NOs 382-383 are the aa sequence and nucleotide sequence of anti-cMet/anti-EGFR comprising an anti-cMet heavy chain Fab domain the cetuximab anti-EGFR scFv, and TFc 39Egy4 (SEQ ID NO: 394); FIG. 14.

[0369] SEQ ID NOs 384-385 are the aa sequence and nucleotide sequence of anti-cMet/anti-EGFR comprising an anti-cMet heavy chain Fab domain, the panitumumab anti-EGFR scFv, and TFc 39Egy4 (SEQ ID NO: 394); FIG. 14.

[0370] SEQ ID NOs 386-387 are the aa sequence and nucleotide sequence of anti-cMet/anti-EGFR comprising an anti-cMet heavy chain Fab domain, the 2224 anti-EGFR scFv, and TFc 39Egy4 (SEQ ID NO: 394); FIG. 14.

[0371] For the sequences disclosed in FIG. 17, the double underline is the hinge, the single underline is the CH3 domain, the second double underline is the second hinge, the second underline is the second CH₃.

[0372] SEQ ID NOs 388-389 are the aa sequence and nucleotide sequence of glycosylation mutant 1, comprising N297D/T299S::N297D/T299S amino acid changes in the CH2 domains (underlined, bold-face), and T366S/L368A/Y407V/CH3 C-terminal Cysteine KSCDKT::T366W/CH3 C-terminal Cysteine GEC in the CH3 domains (“KSCDKT” and “GEC” disclosed as SEQ ID NOS 167 and 168, respectively); FIG. 17 SEQ ID NOs 390-391 are the aa sequence and nucleotide sequence of glycosylation mutant 2, comprising T299K::N297D/T299S amino acid changes in the CH2 domains (underlined, bold-face), and T366S/L368A/Y407V/CH3 C-terminal Cysteine KSCDKT::T366W/CH3 C-terminal Cysteine GEC in the CH3 domains (“KSCDKT” and “GEC” disclosed as SEQ ID NOS167 and 168, respectively); FIG. 17.

[0373] SEQ ID NOs 392-393 are the aa sequence and nucleotide sequence of glycosylation mutant 3, comprising N297D/T299S::T299K amino acid changes in the CH2 domains (underlined, bold-face), and T366S/L368A/Y407V/CH3 C-terminal Cysteine KSCDKT::T366W/CH3 C-terminal Cysteine GEC in the CH3 domains (“KSCDKT” and “GEC” disclosed as SEQ ID NOS 167 and 168, respectively); FIG. 17.

[0374] SEQ ID NOs 394-395 are the aa sequence and nucleotide sequence of glycosylation mutant 4, comprising T299K::T299D amino acid changes in the CH2 domains (underlined, bold-face), and T366S/L368A/Y407V/CH3 C-terminal Cysteine KSCDKT::T366W/CH3 C-terminal Cysteine GEC in the CH3 domains (“KSCDKT” and “GEC” disclosed as SEQ ID NOS 167 and 168, respectively); FIG. 17.

[0375] SEQ ID NOs 396-397 are the aa sequence and nucleotide sequence of glycosylation mutant 5, comprising T299D::T299K amino acid changes in the CH2 domains (underlined, bold-face), and T366S/L368A/Y407V/CH3 C-terminal Cysteine KSCDKT::T366W/CH3 C-terminal Cysteine GEC in the CH3 domains (“KSCDKT” and “GEC” disclosed as SEQ ID NOS 167 and 168, respectively); FIG. 17.

[0376] SEQ ID NOs 398-399 are the aa sequence and nucleotide sequence of glycosylation mutant 6, comprising T299D::T299D amino acid changes in the CH2 domains (underlined, bold-face), and T366S/L368A/Y407V/CH3 C-terminal Cysteine KSCDKT::T366W/CH3 C-terminal Cysteine GEC in the CH3 domains (“KSCDKT” and “GEC” disclosed as SEQ ID NOS 167 and 168, respectively); FIG. 17.

[0377] SEQ ID NOs 400-489 are described below.

### DETAILED DESCRIPTION

[0378] Provided herein are Tandem Fc Antibodies (“TFcAs”), e.g., Tandem Fc Bispecific Antibodies (“TFcBAs”). The molecules may be used for treating a cell proliferative disorder, e.g., a cancer.

### DEFINITIONS

[0379] For convenience, the meaning of certain terms and phrases used in the specification, examples, and appended claims, are provided below.

[0380] “aa modification” or “aa change” refers to one or more amino acid (aa) deletion, addition or substitution to an aa sequence. Aa sequence insertions include amino- and/or carboxyl-terminal fusions ranging in length from one residue to polypeptides containing a hundred or more residues, as well as intrasequence insertions of single or multiple aa residues. Intrasequence insertions may range generally from about 1 to 10 residues, e.g., 1 to 5, e.g., 1 to 3.

[0381] “AEM” or “association enhancing modification” refers to an aa modification made to a CH3 domain to enhance its association with another CH3 domain. An AEM may comprise one or more aa substitutions, deletions or additions in one or both Fcs of a TFc. AEMs are classified in modules, e.g., module 1 (“AEM 1”), wherein the modification to one of the two CH3 domains is referred to as AEM 1.1 and the modification to the other CH3 domain is referred to as AEM 1.2. For example, AEM 1.1 consists of the combination of substitutions T366S/L368A and Y407V and AEM 1.2 consists of the aa substitution T366W. When a CH3 domain comprises two or more aa modifications, e.g., aa substitutions, the modifications are separated from each other by a “/”. When referring to modifications in two CH3 domains, the modifications in each of the CH3 domains are separated by “::”.

[0382] An “anti-c-Met binding site” refers to a binding site that binds specifically to human c-Met.

[0383] An “anti-EGFR binding site” refers to a binding site that binds specifically to human EGFR.

[0384] “Antigen binding site” refers to a binding site that comprises the VH and/or VL domain of an antibody, or at least one CDR thereof, provided that the antigen binding site binds specifically to its target antigen. For example, an antigen binding site may comprise, consist essentially of, or consist of a VHCDR3 alone or together with a VHCDR2 and optionally a VHCDR1. In certain embodiments, an antigen binding site comprises a VH domain and a VL domain, which may be present on the same polypeptide or on two different polypeptides, e.g., the VH domain is present on a heavy chain and a VL domain is present on a light chain.

[0385] “Antigen-binding portion” of an antibody refers to one or more fragments of an antibody that retain the ability to specifically bind to an antigen (e.g., c-met or EGFR). It has been shown that the antigen-binding function of an antibody can be retained by fragments of a full-length antibody. Examples of binding fragments encompassed within the term “antigen-binding portion” of an antibody include (i) a Fab fragment, a monovalent fragment consisting of the VL, VH, CL and CH1 domains; (ii) a F(ab′)₂ fragment, a bivalent fragment comprising two Fab fragments linked by a disulfide bridge at the hinge region; (iii) an Fd fragment consisting of the VH and CH1 domains; (iv) an Fv fragment consisting of the VL and VH domains of a single arm of an antibody, (v) a dAb fragment which consists of a VH domain; and (vi) an isolated Complementarity Determining Region (“CDR”). Furthermore, although VL and VH are two domains of an Fv fragment, VL and VH are coded for by separate genes, they can be joined, using recombinant methods, by a synthetic linker that enables them to be made as a single protein chain in which the VL and VH regions pair to form monovalent proteins, known as single chain Fvs (scFvs) (see, e.g., U.S. Pat. No. 5,892,019). Such single chain antibodies are also intended to be encompassed within the term “antigen-binding portion” of an antibody. Other forms of single chain antibodies, such as diabodies are also encompassed. Diabodies are bivalent, bispecific antibodies in which VH and VL domains are expressed on a single polypeptide chain, but using a linker that is too short to allow for pairing between the two domains on the same chain, thereby forcing the domains to pair with complementary domains of another chain and creating two antigen binding sites.

[0386] “Binding affinity” refers to the strength of a binding interaction and includes both the actual binding affinity as well as the apparent binding affinity. The actual binding affinity is a ratio of the association rate over the disassociation rate. The apparent affinity can include, for example, the avidity resulting from a polyvalent interaction. Dissociation constant (Kd), is typically the reciprocal of the binding affinity, and may be conveniently measured using a surface plasmon resonance assay (e.g., as determined using a ForteBio Octet platform (Pall ForteBio Corp.) or a BIACORE 3000 instrument (GE Healthcare) e.g., using recombinant c-Met as the analyte and an anti-c-Met antibody as the ligand) or a cell binding assay, examples of which assays is described in Example 3 of U.S. Pat. No. 7,846,440.

[0387] “Binding moiety,” “binding domain,” or “binding site,” refers to the portion, region, or site of a binding polypeptide or, when so specified, of a heavy or light chain thereof, that is directly involved in mediating the specific binding of an antibody to a target molecule (i.e., an antigen). Exemplary binding domains include an antigen binding site, a receptor binding domain of a ligand, a ligand binding domain of a receptor or an enzymatic domain. In preferred embodiments, the binding domain comprises or consists of an antigen binding site (e.g., comprising a variable heavy (VH) chain sequence and variable light (VL) chain sequence or six CDRs from an antibody placed into alternative framework regions (e.g., human framework regions optionally comprising one or more aa substitutions). In certain embodiments, a binding site may be comprised essentially only of a VH or a VL chain sequence. A binding site may be entirely from one species, e.g., it has only sequences that derive from the germline sequences of one species. For example, a binding site may be human (i.e., from the human species), mouse, or rat. A binding site may also be humanized, i.e., the CDRs are from one species and the frameworks (FRs) are from another species. For example, a binding site may have CDRs that were derived from a mouse antibody and FRs that are from the human species. Certain humanized binding sites comprise mutations in one or more CDR to make the CDRs look more like the CDRs of the donor antibody. Certain humanized antibodies may also comprise mutations in one or more FR. Generally mutations in a binding site may enhance the affinity of binding of the binding site to its target antigen, and/or they may stabilize the binding site, e.g., to extend its half-life.

[0388] “CDR” or “complementarity determining region” refers to the noncontiguous antigen combining sites found within the variable region of both heavy and light chain polypeptides. These particular regions have been described by Kabat et al., J. Biol. Chem. 252, 6609-6616 (1977) and Kabat et al., Sequences of protein of immunological interest. (1991), and by Chothia et al., J. Mol. Biol. 196:901-917 (1987) and by MacCallum et al., J. Mol. Biol. 262:732-745 (1996) where the definitions include overlapping or subsets of aa residues when compared against each other. The aa residues which encompass the CDRs as defined by each of the above cited references are set forth for comparison. As used herein, and if not otherwise specified, “CDR” is as defined by Kabat. When CDRs (e.g., VH or VL CDRs) are described within larger sequences herein, they are always arranged in N-terminal to C-terminal order as CDR1, CDR2, CDR3, and are separated by framework amino acid sequences.

TABLE 1
CDR definitions

| | CDR Definitions | | |
|---|---|---|---|
| | Kabat¹ | Chothia² | MacCallum³ |
| VHCDR1 | 31-35 | 26-32 | 30-35 |
| VHCDR2 | 50-65 | 53-55 | 47-58 |
| VHCDR3 | 95-102 | 96-101 | 93-101 |
| VLCDR1 | 24-34 | 26-32 | 30-36 |
| VLCDR2 | 50-56 | 50-52 | 46-55 |
| VLCDR3 | 89-97 | 91-96 | 89-96 |

¹Residue numbering follows the nomenclature of Kabat et al., 1991, supra
²Residue numbering follows the nomenclature of Chothia et al., supra
³Residue numbering follows the nomenclature of MacCallum et al., supra

[0389] “CH1 domain” refers to the heavy chain immunoglobulin constant domain located between the VH domain and the hinge. It spans EU positions 118-215. A CH1 domain may be a naturally occurring CH1 domain, or a naturally occurring CH1 domain in which one or more amino acids (“aas”) have been substituted, added or deleted, provided that the CH1 domain has the desired biological properties. A desired biological activity may be a natural biological activity, an enhanced biological activity or a reduced biological activity relative to the naturally occurring sequence.

[0390] “CH2 domain” refers to the heavy chain immunoglobulin constant domain that is located between the hinge and the CH3 domain. As defined here, it spans EU positions 237-340. A CH2 domain may be a naturally occurring CH2 domain, or a naturally occurring CH2 domain in which one or more aas have been substituted, added or deleted, provided that the CH2 domain has the desired biological properties. A desired biological activity may be a natural biological activity, an enhanced biological activity or a reduced biological activity relative to that of the naturally occurring domain.

[0391] “CH3 domain” refers to the heavy chain immunoglobulin constant domain that is located C-terminally of the CH2 domain and spans approximately 110 residues from the N-terminus of the CH2 domain, e.g., about positions 341-446b (EU numbering system). A CH3 domain may be a naturally occurring CH3 domain, or a naturally occurring CH3 domain in which one or more aas have been substituted, added or deleted, provided that the CH3 domain has the desired biological properties. A desired biological activity may be a natural biological activity, an enhanced biological activity or a reduced biological activity relative to that of the naturally occurring domain. A CH3 domain may or may not comprise a C-terminal lysine.

[0392] “CH4 domain” refers to the heavy chain immunoglobulin constant domain that is located C-terminally of the CH3 domain in IgM and IgE antibodies. A CH4 domain may be a naturally occurring CH4 domain, or a naturally occurring CH4 domain in which one or more aas have been substituted, added or deleted, provided that the CH4 domain has the desired biological properties. A desired biological activity may be a natural biological activity, an enhanced biological activity or a reduced biological activity relative to that of the naturally occurring domain.

[0393] “CL domain” refers to the light chain immunoglobulin constant domain that is located C-terminally to the VL domain. It spans about Kabat positions 107A-216. A CL domain may be a naturally occurring CL domain, or a naturally occurring CL domain in which one or more aas have been substituted, added or deleted, provided that the CL domain has the desired biological properties. A desired biological activity may be a natural biological activity, an enhanced biological activity or a reduced biological activity relative to that of the naturally occurring domain. A CL domain may or may not comprise a C-terminal lysine.

[0394] “c-Met” or “c-MET” refers to Mesenchymal-Epithelial Transition (MET) factor, which is also known as Hepatocyte Growth Factor Receptor (HGFR), Scatter Factor (SF) receptor, AUTS9, RCCP2, corresponds to Gene ID 4233, and has tyrosine-kinase activity. The primary single chain precursor protein is post-translationally cleaved to produce the alpha and beta subunits, which are disulfide linked to form the mature receptor. Two transcript variants encoding different isoforms have been found for this gene. HGF is the only known ligand for c-Met. The aa sequence of the human c-Met isoform a precursor is provided at Genbank Accession No. NP_{—}001120972.1 and isoform b precursor is provided at Genbank Accession No. NP_{—}000236.2.

[0395] A “constant region” or domain of a light chain of an immunoglobulin is referred to interchangeably as a “CL,” “light chain constant region domain,” “CL region” or “CL domain.” A constant domain on a heavy chain (e.g. hinge, CH1, CH2 or CH3 domains) of an immunoglobulin is referred to interchangeably as a “CH,” “heavy chain constant domain,” “CH” region or “CH domain.” A variable domain on an immunoglobulin light chain is referred to interchangeably as a “VL,” “light chain variable domain,” “VL region” or “VL domain.” A variable domain on an immunoglobulin heavy chain is referred to interchangeably as a “VH,” “heavy chain variable domain,” “VH region” or “VH domain.”

[0396] “DiS” refers to the modification of a domain, e.g., a hinge or CH3 domain, that results in the addition of a Cysteine, which can form a disulfide bond with another Cysteine. A DiS may comprise one or more aa substitutions, deletions or additions in one or both Fcs of a TFc. DiSs are classified in modules, e.g., module 1 (“DiS 1”), wherein the modification to one of the two Fcs is referred to as DiS 1.1 and the modification to the other Fc is referred to as DiS 1.2. For example, DiS 1.1 consists of the substitution Y349C and DiS 1.2 consists of the aa substitution S354C.

[0397] “Domain” refers generally to a region, e.g., an independently folding, globular region or a non-globular region (e.g., a linker domain), of a heavy or light chain polypeptide which may comprise peptide loops (e.g., 1 to 4 peptide loops) that may be stabilized, for example, by a β-pleated sheet and/or an intrachain disulfide bond. The constant and variable regions of immunoglobulin heavy and light chains are typically folded into domains. In particular, each one of the CH1, CH2, CH3, CH4, CL, VH and VL domains typically form a loop structure.

[0398] “EC₅₀” or “EC50” refers to the concentration of a molecule, e.g., a TFcA, that provides 50% of the maximal effect of the protein on a particular system such as a binding assay or a signal transduction pathway.

[0399] “EGFR” refers to Epidermal Growth Factor Receptor, which is also known as ErbB1, HER-1, mENA, and PIG61. EGFR is known to bind ligands including epidermal growth factor (EGF), transforming growth factor α (TGf-α), amphiregulin, heparin-binding EGF (hb-EGF), betacellulin, epiregulin and has Gene ID 1956 (Herbst, R. S., and Shin, D. M., Cancer 94 (2002) 1593-1611; Mendelsohn, J., and Baselga, J., Oncogene 19 (2000) 6550-6565). EGFR is transmembrane glycoprotein that is a member of the protein kinase superfamily that regulates numerous cellular processes via tyrosine-kinase mediated signal transduction pathways, including, but not limited to, activation of signal transduction pathways that control cell proliferation, differentiation, cell survival, apoptosis, angiogenesis, mitogenesis, and metastasis (Atalay, G., et al., Ann Oncology 14 (2003) 1346-1363; Tsao, A. S., and Herbst, R. S., Signal 4 (2003)₄₋₉; Herbst, R. S., and Shin, D. M., Cancer 94 (2002) 1593-1611; Modjtahedi, H., et al., Br. J. Cancer 73 (1996) 228-235). Binding of the ligand to EGFR induces receptor dimerization and tyrosine autophosphorylation, which leads to cell proliferation. Multiple alternatively spliced transcript variants that encode different protein isoforms have been found for this gene. The aa sequences for human EGFR isoforms a-d precursors are provided at Genbank Accession Nos. NP_{—}005219.2, NP_{—}958439.1, NP_{—}958440.1 and NP_{—}958441.1.

[0400] “EpCAM” refers to epithelial cell adhesion molecule, a protein that in humans is encoded by the EPCAM gene. EpCAM has also been designated as TACSTD1 (tumor-associated calcium signal transducer 1), CD326 (cluster of differentiation 326) and the 17-1A antigen. EpCAM is a pan-epithelial differentiation antigen that is expressed by most carcinomas.

[0401] “ErbB2” or “HER2” refers to a putative tyrosine kinase growth factor receptor EGFR2, p185 HER2/NEU antigen, similar to the EGF receptor. The aa sequences for ErbB2 isoforms are provided at Genbank Accession Nos. NP_{—}004439.2 and NP_{—}001005862.1, and the nucleotide sequence has GeneID 2064.

[0402] “ErbB3” or “HER3” refers to a receptor tyrosine-protein kinase that is encoded by the human ERBB3 gene and has a role in protein amino acid phosphorylation. The aa sequences for ErbB3 isoforms are provided at Genbank Accession Nos. NP001973.2 and NP_{—}001005915.1, and the nucleotide sequence has GeneID 2065.

[0403] “ErbB4” or “HER4” plays a role in receptor tyrosine kinase signal transduction that regulates cellular proliferation and differentiation. The aa sequences for ErbB3 isoforms are provided at Genbank Accession Nos. NP001973.2 and NP_{—}001005915.1, and the nucleotide sequence has GeneID 2066.

[0404] The ERBB2, ERBB3, and ERBB4 genes encode heregulin/neuregulin receptors, members of the EGFR-related type I receptor tyrosine kinase subfamily. The encoded proteins form homo- and heterodimers, which complicates assignment of function: ERBB2 homodimers do not bind heregulin, but ERBB2/ERBB3 heterodimers do. Herstatin is a secreted alternative ERBB2 product, of the extracellular domain, that binds to p185ERBB2, disrupts ERBB2 dimers, reduces p185 phosphorylation, and inhibits growth. Human ERBB2 gene is located at 17p12-21. Overexpression of HER-2 correlates with poor prognosis in breast carcinoma.

[0405] “IGF1R” refers to the insulin-like growth factor 1 receptor. Exemplary human IGF1R nucleic acid and protein sequences are set forth in RefSeqGene Gene ID: 3480 and GenBank Accession Number: NP_{—}000866.1, respectively.

[0406] “IGF2R” refers to the insulin-like growth factor 2 receptor. Exemplary human IGF2R nucleic acid and protein sequences are set forth in RefSeqGene Gene ID: 3482 and GenBank Accession Number: NP_{—}000867.2, respectively.

[0407] “Insulin receptor” refers to the cellular receptor for insulin. Exemplary human insulin receptor nucleic acid and protein sequences are set forth in RefSeqGene Gene ID: 3643 and GenBank Accession Number: NP_{—}000199.2, respectively.

[0408] “RON” refers to the receptor for Macrophage-stimulating protein receptor. Exemplary human RON nucleic acid and protein sequences are set forth in RefSeqGene Gene ID: 4486 and GenBank Accession Number: NP_{—}002438.2, respectively.

[0409] “c-Kit” refers to v-kit Hardy-Zuckerman 4 feline sarcoma viral oncogene homolog. Exemplary human c-Kit nucleic acid and protein sequences are set forth in RefSeqGene Gene ID: 3815 and GenBank Accession Number: NP_{—}001087241.1, respectively.

[0410] “VEGFR1” refers to vascular endothelial growth factor 1. Exemplary human VEGFR1 nucleic acid and protein sequences are set forth in RefSeqGene Gene ID: 2321 and GenBank Accession Number: NP_{—}002010.2, respectively.

[0411] “VEGFR2” refers to vascular endothelial growth factor 2. Exemplary human VEGFR2 nucleic acid and protein sequences are set forth in RefSeqGene Gene ID: 3791 and GenBank Accession Number: NP_{—}002244.1, respectively.

[0412] “TNFR” refers to tumor necrosis factor receptor. Exemplary human TNFR nucleic acid and protein sequences are set forth in RefSeqGene Gene ID: 7132 and GenBank Accession Number: NP_{—}001056.1, respectively.

[0413] “FGFR1” refers to fibroblast growth factor receptor 1. Exemplary human FGFR1 nucleic acid and protein sequences are set forth in RefSeqGene Gene ID: 2260 and GenBank Accession Number: NP_{—}001167537.1, respectively.

[0414] “FGFR2” refers to fibroblast growth factor receptor 2. Exemplary human FGFR2 nucleic acid and protein sequences are set forth in RefSeqGene Gene ID: 2263 and GenBank Accession Number: NP_{—}001138390.1, respectively.

[0415] “FGFR3” refers to fibroblast growth factor receptor 3. Exemplary human FGFR3 nucleic acid and protein sequences are set forth in RefSeqGene Gene ID: 2261 and GenBank Accession Number: NP_{—}000133.1, respectively.

[0416] “FGFR4” refers to fibroblast growth factor receptor 4. Exemplary human FGFR4 nucleic acid and protein sequences are set forth in RefSeqGene Gene ID: 2264 and GenBank Accession Number: NP_{—}075252.2, respectively.

[0417] “PDGFR-alpha” refers to platelet-derived growth factor receptor alpha. Exemplary human PDGFR-alpha nucleic acid and protein sequences are set forth in RefSeqGene Gene ID: 5156 and GenBank Accession Number: NP_{—}006197.1, respectively.

[0418] “PDGFR-beta” refers to platelet-derived growth factor receptor beta. Exemplary human PDGFR-beta nucleic acid and protein sequences are set forth in RefSeqGene Gene ID: 5159 and GenBank Accession Number: NP_{—}002600.1, respectively.

[0419] “EpCAM” refers to epithelial cell adhesion molecule. Exemplary human EpCAM nucleic acid and protein sequences are set forth in RefSeqGene Gene ID: 4072 and GenBank Accession Number: NP_{—}002345.2, respectively.

[0420] “EphA2” refers to EPH receptor A2. Exemplary human EphA2 nucleic acid and protein sequences are set forth in RefSeqGene Gene ID: 1969 and GenBank Accession Number: NP_{—}004422.2, respectively.

[0421] “CEA” refers to carcinoembryonic antigen-related cell adhesion molecule 5. Exemplary human CEA nucleic acid and protein sequences are set forth in RefSeqGene Gene ID: 1048 and GenBank Accession Number: NP_{—}004354.2, respectively.

[0422] “CD44” refers to the cell-surface glycoprotein CD44. Exemplary human CD44 nucleic acid and protein sequences are set forth in RefSeqGene Gene ID: 960 and GenBank Accession Number: NP_{—}001189486.1, respectively.

[0423] “ALK” refers to the anaplastic lymphoma receptor tyrosine kinase. Exemplary human

[0424] ALK nucleic acid and protein sequences are set forth in RefSeqGene Gene ID: 238 and GenBank Accession Number: NP_{—}004295.2, respectively.

[0425] “AXL” refers to the AXL receptor tyrosine kinase. Exemplary human AXL nucleic acid and protein sequences are set forth in RefSeqGene Gene ID: 558 and GenBank Accession Number: NP_{—}068713.2, respectively.

[0426] “EU” indicates that aa positions in a heavy chain constant region, including aa positions in the CH1, hinge, CH2, and CH3 domains, are numbered herein according to the EU index numbering system (see Kabat et al., in “Sequences of Proteins of Immunological Interest”, U.S. Dept. Health and Human Services, 5^{th} edition, 1991).

[0427] “Fab” refers to the antigen binding portion of an antibody, comprising two chains: a first chain that comprises a VH domain and a CH1 domain and a second chain that comprises a VL domain and a CL domain. Although a Fab is typically described as the N-terminal fragment of an antibody that was treated with papain and comprises a portion of the hinge region, it is also used herein as referring to a binding domain wherein the heavy chain does not comprise a portion of the hinge.

[0428] “Fc region” refers to the portion of a single immunoglobulin heavy chain beginning in the hinge region just upstream of the papain cleavage site (i.e. residue 216 in IgG, taking the first residue of heavy chain constant region to be 114) and ending at the C-terminus of the antibody. Accordingly, a complete Fc region comprises at least a hinge, a CH2 domain, and a CH3 domain. Two Fc regions that are dimerized are referred to as “Fc” or “Fc dimer.” An Fc region may be a naturally occurring Fc region, or a naturally occurring Fc region in which one or more aas have been substituted, added or deleted, provided that the Fc region has the desired biological properties. A desired biological activity may be a natural biological activity, an enhanced biological activity or a reduced biological activity relative to that of the naturally occurring domain.

[0429] “Framework region” or “FR” or “FR region” includes the aa residues that are part of the variable region, but are not part of the CDRs (e.g., using the Kabat definition of CDRs). Therefore, a variable region framework is between about 100-120 aas in length but includes only those aas outside of the CDRs. For the specific example of a heavy chain variable region and for the CDRs as defined by Kabat et al., 1991, ibid., framework region 1 corresponds to the domain of the variable region encompassing aas 1-30; framework region 2 corresponds to the domain of the variable region encompassing aas 36-49; framework region 3 corresponds to the domain of the variable region encompassing aas 66-94, and framework region 4 corresponds to the domain of the variable region from aas 103 to the end of the variable region. The framework regions for the light chain are similarly separated by each of the light chain variable region CDRs. Similarly, using the definition of CDRs by Chothia et al. or McCallum et al. the framework region boundaries are separated by the respective CDR termini as described above. In preferred embodiments, the CDRs are as defined by Kabat.

[0430] “Full length antibody” or “full length Ab” is an antibody (“Ab”) that comprises one or more heavy chains and one or more light chains, which optionally may be connected. Each heavy chain is comprised of a heavy chain variable region (abbreviated herein as VH) and a heavy chain constant region. The heavy chain constant region is comprised of three domains CH1, CH2, and CH3, and optionally a fourth domain, CH4. Each light chain is comprised of a light chain variable region (abbreviated herein as VL) and a light chain constant region. The light chain constant region is comprised of one domain, CL. The VH and VL regions can be further subdivided into regions of hypervariability, termed complementarity determining regions (CDR), interspersed with regions that are more conserved, termed framework regions (FR). Each VH and VL is typically composed of three CDRs and four FRs, arranged from amino-terminus to carboxyl-terminus in the following order: FR1, CDR1, FR2, CDR2, FR3, CDR3, and FR4. Immunoglobulin proteins can be of any type or class (e.g., IgG, IgE, IgM, IgD, IgA and IgY) or subclass (e.g., IgG1, IgG2, IgG3, IgG4, IgA1 and IgA2).

[0431] “Gly-Ser linker” or “Gly-Ser peptide” refers to a peptide that consists of glycine and serine residues. An exemplary Gly-Ser peptide comprises the aa sequence (Gly4 Ser)n (SEQ ID NO: 493), wherein n=1, 2, 3, 4, 5, 6, 7, 8, 9, 10, 11, 12, 13, 14, 15, 16, 17, 18, 19, 20 or more. In certain embodiments, n is a number between 1 and 5, n is a number between 6 and 10, n is a number between 11 and 15, n is a number between 16 and 20, n is a number between 21 and 25, or n is a number between 26 and 30.

[0432] “Hinge” or “hinge region” or “hinge domain” refers to the flexible portion of a heavy chain located between the CH1 domain and the CH2 domain. It is approximately 25 aas long, and is divided into an “upper hinge,” a “middle hinge” or “core hinge,” and a “lower hinge.” A hinge may be a naturally occurring hinge, or a naturally occurring hinge in which one or more aas have been substituted, added or deleted, provided that the hinge has the desired biological properties. A desired biological activity may be a natural biological activity, an enhanced biological activity or a reduced biological activity relative to the naturally occurring sequence.

[0433] A “hinge subdomain” refers to the upper hinge, middle (or core) hinge or the lower hinge. The aa sequences of the hinge subdomains of an IgG1, IgG2, IgG3 and IgG4 are set forth in Table 2:

TABLE 2
Listing of IgG hinge subdomains

| IgG | Upper hinge | Middle hinge | Lower hinge | Complete hinge |
|---|---|---|---|---|
| IgG1 | EPKSCDKTHT | CPPCP | APELLG | SEQ ID NO: 4 |
| | (SEQ ID NO: 1) | (SEQ ID NO: 2) | (SEQ ID NO: 3) | |
| IgG2 | ERKCCVE | CPPCP | APPVAGP | SEQ ID NO: 7 |
| | (SEQ ID NO: 5) | (SEQ ID NO: 2) | (SEQ ID NO: 6) | |
| IgG3 | ELKTPLGDTTHT | CPRCP(EPKSCDTPPPCPRCP)₃ | APELLG | SEQ ID NO: 11 |
| | (SEQ ID NO: 8) | (SEQ ID NO: 9) | (SEQ ID NO: 10) | |
| IgG4 | ESKYGPP | CPSCP | APEFLG | SEQ ID NO: 15) |
| | (SEQ ID NO: 12) | (SEQ ID NO: 13) | (SEQ ID NO: 14) | |

[0434] The complete hinge consists of the upper hinge subdomain, middle hinge subdomain and lower hinge subdomain in amino to carboxy terminal order and without intervening sequences.

[0435] “IC₅₀,” or “IC50” refers to the concentration of a molecule, e.g., a TFcA, that provides a 50% inhibition of a maximal activity (e.g., a response to a stimulus or a constitutive activity), i.e., a concentration that reduces the activity to a level halfway between the maximal activity and the baseline. The IC₅₀ value may be converted to an absolute inhibition constant (Ki) using, e.g., the Cheng-Prusoff equation. In a system that is inhibited by a binding agent, such as an antibody or a TFcA provided herein, the IC50 may be indistinguishable from the EC50.

[0436] “Inhibition” of a biological activity by a binding protein refers to any reproducibly detectable decrease in biological activity mediated by the binding protein. In some embodiments, inhibition provides a statistically significant decrease in biological activity, e.g., a decrease of about 5%, 10%, 20%, 30%, 40%, 50%, 60%, 70%, 80%, 90%, or 100% in biological activity relative to the biological activity determined in the absence of the binding protein.

[0437] “Kabat” in conjunction with designation of immunoglobulin aa sequence positions indicates that amino acid positions in a light chain constant region (e.g. CL domain) are numbered according to the Kabat index numbering system (see Kabat et al., 1991., op. cit.).

[0438] “Linked to” refers to direct or indirect linkage or connection of, in context, amino acids or nucleotides. An “indirect linkage” refers to a linkage that is mediated through a linker or a domain, comprising, e.g., one or more aas or nucleotides. A “direct linkage” or “linked directly” when referring to two polypeptide segments refers to the presence of covalent bond between the two polypeptide segments, e.g., the two polypeptide segments are joined contiguously without intervening sequences.

[0439] “Linker” refers to one or more aas connecting two domains or regions together. A linker may be flexible to allow the domains being connected by the linker to form a proper three dimensional structure thereby allowing them to have the required biological activity. A linker connecting the VH and the VL of an scFv is referred to herein as an “scFv linker” A linker connecting the N-terminus of a VH domain or the C-terminus of the CH3 domain to a second VH or VL domain, e.g., that of an scFv, is referred to as a “connecting linker.”

[0440] “Module” refers to a structurally and/or functionally distinct part of a TFcA, such a binding site (e.g., an scFv domain or a Fab domain) and the TFc. Modules provided herein can be rearranged (by recombining sequences encoding them, either by recombining nucleic acids or by complete or fractional de novo synthesis of new polynucleotides) in numerous combinations with other modules to produce a wide variety of TFcAs, e.g., as disclosed herein. “Module” is also used to refer to the type of AEM or DiS modifications. In this context, and as further described herein, a “module” is one or a combination of two or more aa substitutions, additions or deletions that are made to enhance or favor the association or dimerization of the Fc regions comprising these modifications.

[0441] “% identical” refers to two or more nucleic acid or polypeptide sequences or subsequences that are the same (100% identical) or have a specified percentage of nucleotide or aa residues that are the same, when the two sequences are aligned for maximum correspondence and compared. To align for maximum correspondence, gaps may be introduced into one of the sequences being compared. The aa residues or nucleotides at corresponding positions are then compared and quantified. When a position in the first sequence is occupied by the same residue as the corresponding position in the second sequence, then the sequences are identical at that position. The percent identity between the two sequences is a function of the number of identical positions shared by the sequences (e.g., % identity=# of identical positions/total # of positions (e.g., overlapping positions)×100). In certain embodiments, the two sequences are the same length. The determination that one sequence is a measured % identical with another sequence can be determined using a mathematical algorithm. A non-limiting example of a mathematical algorithm utilized for such comparison of two sequences is incorporated in the ALIGN program (version 2.0) which is part of the GCG sequence alignment software package. When utilizing the ALIGN program e.g., for comparing aa sequences, a PAM120 weight residue table, a gap length penalty of 12, and a gap penalty of 4 may be used. Additional algorithms for sequence analysis are well known in the art and many are available online

[0442] “Portion” or “fragment” (e.g., of a domain) of a reference moiety refers to a discrete part of the whole reference moiety (e.g., domain, e.g., a naturally occurring domain) that is at least, or at most 10% 20%, 30%, 40%, 50%, 60%, 70%, 80%, 90%, 95%, 98%, or 99% of the size of the reference moiety.

[0443] “scFv linker” refers to a peptide or polypeptide domain interposed between the VL and VH domains of an scFv. scFv linkers preferably allow orientation of the VL and VH domains in a antigen binding conformation. In one embodiment, an scFv linker comprises or consists of a peptide or polypeptide linker that only comprises glycines and serines (a “Gly-Ser linker”). In certain embodiments, an scFv linker comprises a disulfide bond.

[0444] “Specific binding,” “specifically binds,” “selective binding,” and “selectively binds,” as well as “binds specifically” “binds selectively,” when referring to the binding of a binding site to its target epitope or a combination of binding sites to their target epitopes, means that the binding site(s) exhibit(s) immunospecific binding to the target epitope(s). A binding site that binds specifically to an epitope exhibits appreciable affinity for a target epitope and, generally, does not exhibit cross-reactivity with other epitopes in that it does not exhibit appreciable affinity to any unrelated epitope and preferably does not exhibit affinity for any unrelated epitope that is equal to, greater than, or within two orders of magnitude lower than the affinity for the target epitope.

[0445] “Appreciable” or preferred binding includes binding with a dissociation constant (Kd) of 10⁻⁸, 10⁻⁹ M, 10⁻¹⁰, 10⁻¹¹, 10⁻¹² M, 10⁻¹³ M or an even lower Kd value. The Kd values can also be indicated as 10e-8, 10e-9 M, etc. Note that lower values for Kd (dissociation constant) indicate higher binding affinity, thus a Kd of 10⁻⁷ is a higher Kd value than a Kd of 10⁻⁸, but indicates a lower binding affinity than a Kd of 10⁻⁸. Dissociation constants with values of about 10⁻⁷M, and even as low as about 10⁻⁸ M, are at the high end of dissociation constants suitable for therapeutic antibodies. Binding affinities may be indicated by a range of dissociation constants, for example, 10⁻⁶ to 10⁻¹² M, 10⁻⁷ to 10⁻¹²M, 10⁻⁸ to 10⁻¹²M or better (i.e., or lower value dissociation constant). Dissociation constants in the nanomolar (10⁻⁹ M) to picomolar (10⁻¹² M) range or lower are typically most useful for therapeutic antibodies. Suitable dissociation constants are Kds of 50 nM or less (i.e., a binding affinity of 50 nM or higher—e.g., a Kd of 45 nM) or Kds of 40 nM, 30 nM, 20 nM, 10 nM, 1 nM, 100 μM, 10 μM or 1 μM or less. Specific or selective binding can be determined according to any art-recognized means for determining such binding, including, for example, according to Scatchard analysis and/or competitive binding assays.

[0446] A “TFc” or “tandem Fc” refers to an entity comprising in an amino to carboxyl terminal order: a first Fc region, which is linked at its C-terminus to the N-terminus of a TFc linker, which is linked at its C-terminus to the N-terminus of a second Fc region, wherein the first and the second Fc regions associate to form an Fc.

[0447] “TFcA” refers to a tandem Fc antibody. A TFcA may be a monovalent or monospecific TFcA, e.g., comprising a single binding site. A TFcA may also be a bispecific TFcA, which is referred to herein as a TFcBA. A TFcA may be monoclonal.

[0448] “TFcBA” refers to a tandem Fc bispecific antibody, an artificial hybrid protein comprising at least two different binding moieties or domains and thus at least two different binding sites (e.g., two different antibody binding sites), wherein one or more of the pluralities of the binding sites are covalently linked, e.g., via peptide bonds, to each other. An exemplary TFcBA described herein is an anti-c-Met+anti-EGFR TFcBA, which is a polyvalent bispecific antibody that comprises a first binding site binding specifically to a c-Met protein, e.g., a human c-Met protein, and one or more second binding sites binding specifically to an EGFR protein, e.g., a human EGFR protein. When a TFcBA name comprises two antigens separated by a plus sign (+) this indicates that the binding sites for the two antigens may be in either relative amino to carboxy orientation in the molecule, whereas when the TFcBA name comprises two antigen binding site names separated by a slash (/) the antigen binding site to the left of the slash is amino terminal to the antigen binding site to the right of the slash. A TFcBA may be a bivalent binding protein, a trivalent binding protein, a tetravalent binding protein or a binding protein with more than 4 binding sites. An exemplary TFcBA is a bivalent bispecific antibody, i.e., an antibody that has 2 binding sites, each binding to a different antigen or epitope. In certain embodiments, the N-terminal binding site of a TFcBA is a Fab and the C-terminal binding site is an scFv.

### Tandem Fc Abs

[0449] Provided herein are Tandem Fc Antibodies (“TFcAs”), which may be monovalent or polyvalent, e.g., bivalent, trivalent, or tetravalent. TFcAs which are polyvalent may be monospecific, bispecific (“Tandem Fc Bispecific Abs” or “TFcBAs”) trispecific or tetraspecific TFcBAs. When a TFcBA is multispecific, it may be monovalent for one or more specificities.

[0450] In certain embodiments, a TFcA is a TFcBA. Exemplary TFcBAs inhibit ligand-induced signal transduction through one or both of the receptors targeted by the TFcBA and may thereby inhibit tumor cell proliferation or tumor growth. TFcBAs may also induce receptor downregulation or block receptor dimerization. Exemplary anti c-Met/anti-EGFR TFcBAs comprise a single anti-c-Met binding site (monovalent for anti-c-Met) and one or more anti-EGFR binding sites (monovalent or polyvalent for anti-EGFR). A TFc typically comprises a first Fc region linked to a second Fc region through a TFc linker, wherein the first and the second Fc regions dimerize to form an Fc.

[0451] FIG. 1A and FIG. 1B show a diagram of an exemplary TFcBA showing the various elements of the molecule. As shown in FIG. 1A and FIG. 1B, a TFcBA comprises a first binding site (e.g., an anti-c-Met Fab), a second binding site (e.g., an anti-EGFR scFv), and a tandem Fc (“TFc”) that links the first and the second binding sites together. A TFcBA may be described as containing three modules, wherein the first module comprises the first binding site, the second module comprises the TFc and the third module comprises the second binding site. A TFc generally comprises in a contiguous aa sequence a first Fc region, a TFc linker, and a second Fc region, wherein the TFc linker links the first Fc region to the second Fc region and allows the association of the two Fc regions. As illustrated in the exemplary TFcBA in FIG. 1A and FIG. 1B, each of the two Fc regions of a TFc may comprise a hinge, a CH2 domain and a CH3 domain. Each of these regions may be from the same immunoglobulin isotype, or from different isotypes. For example, the hinge, CH2 and CH3 domains may all be from IgG1, IgG2, IgG3 or IgG4, or certain domains or portions thereof may be from one immunoglobulin isotype and another domain or portion may be from another immunoglobulin isotype. For example, the TFcBA that is pictured in FIG. 1A and FIG. 1B comprises all domains from IgG1, or alternatively, it may comprise an IgG1/IgG4 hybrid hinge, an IgG4 CH2 domain and an IgG1 CH3 domain. An Fc region preferably comprises human Fc domains, however, sequences from other mammals or animals may also be used, provided that the TFcBA retains its biological activity and is preferably not significantly immunogenic in a human subject.

[0452] In preferred embodiments, the first and/or the second Fc region comprise one or more modifications to enhance their association and/or to stabilize such association. In certain embodiments, the first and/or the second CH3 domains of a TFcA comprises one or more modification to enhance the association of the CH3 domains or Fcs comprising such. Such modifications are referred to herein as Association Enhancing Modifications or “AEMs.” Exemplary modifications include aa substitutions in both CH3 domains to enhance their interaction, e.g., knob/hole mutations.

[0453] In certain embodiments, the first and/or the second Fc region comprises an aa modification that results in the addition of one or more cysteines to the Fc region, to thereby form a disulfide bond with the other Fc region of the TFc. Such modifications are referred to herein as disulfide forming modifications or “DiS” modifications. DiS modifications may be present in the hinge, CH2 and/or CH3 domains.

[0454] A TFc may comprise one or more AEM and/or one or more DiS modifications. FIG. 1B shows exemplary modifications that can be made to either the CH3 region or the hinge. Fc regions may also comprise additional modifications, e.g., modifications that modulate a biological activity that is mediated through the Fc region, such as ADCC.

[0455] Although generally, the first and the second Fc regions comprise a hinge, a CH2 domain and a CH3 domain, in certain embodiments, an Fc region may comprise a CH3 domain and a CH2 domain, but no hinge. In other embodiments, an Fc region comprises a CH3 domain and a hinge, but does not comprise a CH2 domain. In other embodiments, an Fc region may comprise a CH3 domain and a CH4 domain, but does not comprise a CH2 domain nor a hinge. In other embodiments, an Fc region may comprise a CH3 domain, a CH4 domain, a CH2 domain, but does not comprise a hinge. In other embodiments, an Fc region may comprise a CH3 domain, a CH4 domain, a hinge, but does not comprise a CH2 domain. In certain embodiments, a portion of one or more domains is absent.

[0456] In certain embodiments, the first Fc region comprises an aa sequence that differs from that of the second Fc region in one or more aa addition, deletion or substitution (a “heterodimeric Fc”). This is often the case as AEM and DiS modifications, which typically introduce different modifications to the first and the second Fc region. In other embodiments, the first Fc region comprises the same aa sequence as the second Fc region (a “homodimeric Fc”).

[0457] In certain embodiments, an Fc domain (hinge, CH2 or CH3 domain) is directly linked to another Fc domain. For example, a hinge may be directly linked to a CH2 domain and/or a CH2 domain may be directly linked to a CH3 domain. In other embodiments, an Fc domain is linked to another Fc domain through a linker, which may be one or more aas long, provided that the TFcA comprising these domains has the desired biological activity and stability and any other desired characteristics.

[0458] In certain embodiments, a binding site is an antigen binding site, which comprises, e.g., a heavy chain variable (VH) domain and a light chain variable (VL) domain. The VH and VL domains generally contain 3 Complementarity Determining Regions (CDRs) each, although in certain embodiments, fewer than 6 CDRs may be sufficient for providing specific binding to an antigen. In certain embodiments, the VH domain is part of a Fab, in which case, the VH domain is linked to a CH1 domain, generally in the natural order, i.e., the VH domain is linked to the N-terminus of the CH1. When the antigen binding site is part of a Fab, the VL domain may be linked to a light chain constant (CL) domain, generally in the natural order, i.e., the VL domain is linked to the N-terminus of the CL domain.

[0459] The variable domains (VH and VL) may be linked directly or indirectly to the constant domains (CH1 and CL), e.g., through a linker, which may be one or more aas long, provided that the TFcA comprising these domains has the desired biological activity and stability and any other desired characteristics.

[0460] In certain embodiments, the VH domain is part of an scFv, in which case, the VH domain is linked to the VL domain through an scFv linker, and the scFv is linked to the N- and/or C-terminus of a TFc. When a binding site is an scFv, the variable regions are generally not linked to a CH1 or CL domain.

[0461] In certain embodiments, a TFcA is monovalent and monospecific. A monovalent TFcA may comprise a binding site at the amino terminus or at the C-terminus of the TFc. The binding site of a monovalent TFcA may be a Fab or an scFv. Exemplary heavy chains of monovalent TFcAs comprise in amino to carboxyl terminal order:
[0462] i) a VH domain and a TFc;
[0463] ii) a VH domain, a CH1 domain, and a TFc;
[0464] iii) a VH domain, an scFv linker, a VL domain, and a TFc;
[0465] iv) a TFc, a connecting linker and a VH domain;
[0466] v) a TFc, a connecting linker, a VH domain and a CH1 domain; and
[0467] vi) a TFc, a connecting linker, a VH domain, an scFv linker and a VL domain.

[0468] When a TFcA comprises a Fab, the TFcA also comprises a light chain comprising the VL domain of the Fab and optionally a CL domain.

[0469] In certain embodiments, a TFcA is a TFcBA. TFcBAs may comprise one Fab binding specifically to a first antigen and a second Fab binding specifically to a second antigen. TFcBAs may also comprise a first scFv binding specifically to a first antigen and a second scFv binding specifically to a second antigen. TFcBAs may also comprise a Fab binding specifically to a first antigen and an scFv binding specifically to a second antigen. In certain embodiments, the amino terminus of a TFc is connected to a Fab and the carboxyl terminus of the TFc is connected to an scFv. Alternatively, the amino terminus of a TFc is connected to an scFv and the carboxyl terminus of the TFc is connected to a Fab. Exemplary molecules have the following format: Fab-TFc-scFv; Fab-TFc-Fab; scFv-TFc-scFv; and scFv-TFc-Fab.

[0470] In one embodiment, a TFcBA comprises a heavy chain, which comprises in amino to carboxyl-terminal order:
[0471] (i) a first VH domain, a TFc, a connecting linker, and a second VH domain;
[0472] (ii) a first VH domain, a CH1 domain, a TFc, a connecting linker, and a second VH domain;
[0473] (iii) a first VH domain, a CH1 domain, a TFc, a connecting linker, a second VH domain, an scFv linker and a second VL domain, wherein the second VH and VL domains associate to form a second binding site;
[0474] (iv) a first VH domain, a TFc, a connecting linker, a second VH domain, and a CH1 domain;
[0475] (v) a first VH domain, a first CH1 domain, a TFc, a connecting linker, a second VH domain and a second CH1 domain;
[0476] (vi) a first VH domain, a first scFv linker, a first VL domain, a TFc, a connecting linker, and a second VH domain, wherein the first VL and VH domains associate to form a first binding site;
[0477] (vii) a first VH domain, a first scFv linker, a first VL domain, a TFc, a connecting linker, a second VH domain, and a CH1 domain, wherein the first VL and VH domains associate to form a first binding site; and
[0478] (viii) a first VH domain, a first scFv linker, a first VL domain, a TFc, a connecting linker, a second VH domain, a second scFv linker, and a second VL domain, wherein the first VH and VL domains form a first binding site and the second VH and VL domains form a second binding site.

[0479] A TFcBA of (i-)(v) may further comprise a light chain comprising a first VL domain and optionally a CL domain located at the C-terminus of the VL domain, wherein the first VH and VL domains associate to form a first binding site. A TFcBA of (i), (ii), (iv)-(vii) may comprise a light chain comprising a second VL domain and optionally a CL domain located at the C-terminus of the VL domain, wherein the first VH and VL domains associate to form a second binding site.

[0480] In certain embodiments, a heavy chain comprises a first VH domain, which is linked at its C-terminus to the N-terminus of a TFc, which is linked at its C-terminus to the N-terminus of a connecting linker, which is linked at its C-terminus to the N-terminus of a second VH domain. In certain embodiments, a heavy chain comprises a first VH domain, which is linked at its C-terminus to the N-terminus of a CH1 domain, which is linked at its C-terminus to the N-terminus of a TFc, which is linked at its C-terminus to the N-terminus of a connecting linker, which is linked at its C-terminus to the N-terminus of a second VH domain. In certain embodiments, a heavy chain comprises a first VH domain, which is linked at its C-terminus to the N-terminus of a CH1 domain, which is linked at its C-terminus to the N-terminus of a TFc, which is linked at its C-terminus to the N-terminus of a connecting linker, which is linked at its C-terminus to the N-terminus of a second VH domain, which is linked at its C-terminus to the N-terminus of an scFv linker, which is linked at its C-terminus to the N-terminus of a second VL domain, wherein the second VH and VL domains associate to form a second binding site. In certain embodiments, a heavy chain comprises a first VH domain, which is linked at its C-terminus to the N-terminus of a TFc, which is linked at its C-terminus to the N-terminus of a connecting linker, which is linked at its C-terminus to the N-terminus of a second VH domain, which is linked at its C-terminus to the N-terminus of a CH1 domain. In certain embodiments, a heavy chain comprises a first VH domain, which is linked at its C-terminus to the N-terminus of a first CH1 domain, which is linked at its C-terminus to the N-terminus of a TFc, which is linked at its C-terminus to the N-terminus of a connecting linker, which is linked at its C-terminus to the N-terminus of a second VH domain, which is linked at its C-terminus to the N-terminus of a second CH1 domain. In certain embodiments, a heavy chain comprises a first VH domain, which is linked at its C-terminus to the N-terminus of a first scFv linker, which is linked at its C-terminus to the N-terminus of a first VL domain, which is linked at its C-terminus to the N-terminus of a TFc, which is linked at its C-terminus to the N-terminus of a connecting linker, which is linked at its C-terminus to the N-terminus of a second VH domain, wherein the first VH and VL domains associate to form a first binding site. In certain embodiments, a heavy chain comprises a first VH domain, which is linked at its C-terminus to the N-terminus of a first scFv linker, which is linked at its C-terminus to the N-terminus of a first VL domain, which is linked at its C-terminus to the N-terminus of a TFc, which is linked at its C-terminus to the N-terminus of a connecting linker, which is linked at its C-terminus to the N-terminus of a second VH domain, which is linked at its C-terminus to the N-terminus of a CH1 domain, wherein the first VH and VL domains associate to form a first binding site. In certain embodiments, a heavy chain comprises a first VH domain, which is linked at its C-terminus to the N-terminus of a first scFv linker, which is linked at its C-terminus to the N-terminus of a first VL domain, which is linked at its C-terminus to the N-terminus of a TFc, which is linked at its C-terminus to the N-terminus of a connecting linker, which is linked at its C-terminus to the N-terminus of a second VH domain, which is linked at its C-terminus to the N-terminus of a second scFv linker, which is linked at its C-terminus to the N-terminus of a second VL domain, wherein the first VH and VL domains form a first binding site and the second VH and VL domains form a second binding site.

[0481] In certain embodiments, a VL domain is substituted for the VH domain and the VH domain is substituted for the VL domain in the constructs above.

[0482] When the heavy chain does not comprise either a first or a second VL domain, a VL domain may be provided by a light chain. A light chain may comprise a first or a second VL domain and optionally a CL domain. For example, an scFv may comprise in amino to carboxy terminal order a VL domain, an scFv linker and a VH domain.

[0483] In certain embodiments, a TFcBA comprises a first antigen binding site that binds specifically to a first receptor and a second antigen binding site that binds specifically to a second receptor. In certain embodiments, the first antigen binding site that binds specifically to the first receptor is a Fab and the second antigen binding site that binds specifically to the second receptor is an scFv. Exemplary combinations of binding sites are set forth in Table 3, wherein a “yes” indicates a possible combination and anti-c-Met+anti-EGFR TFcBAs are used to illustrate the possible combinations:

TABLE 3
Exemplary combinations of binding sites of
anti-c-Met + anti-EGFR TFcBAs

| | | Binding site linked to the | | | |
|---|---|---|---|---|---|
| | | N-terminus of the TFc | | | |
| | | Anti-c- | Anti-c- | Anti- | Anti- |
| | | Met | Met | EGFR | EGFR |
| | | scFv | Fab | scFv | Fab |
| Binding site | Anti-c-Met scFv | yes | yes | yes | yes |
| linked to the | Anti-c-Met Fab | yes | yes | yes | yes |
| C-terminus | Anti-EGFR scFv | yes | yes | yes | yes |
| of the TFc | Anti-EGFR Fab | yes | yes | yes | yes |

[0484] In certain embodiments, a TFcBA comprises more than 2 binding sites. A TFcBA may comprise 3, 4, 5, 6 or more binding sites. Additional binding sites may be linked, e.g., to the N- and/or C-terminus of a TFcA or TFcBA. For example, a heavy chain may comprise one or more Fabs and/or scFvs linked to the amino- or carboxyl-terminus of the TFc.

[0485] Exemplary domains of TFcBAs are further described below.

### Exemplary Hinges

[0486] In one embodiment, the first and/or the second Fc region of a TFcA, e.g., a TFcBA, comprises an IgG upper hinge, an IgG middle hinge and/or an IgG lower hinge. For example, an Fc region may comprise one or more IgG1 upper, middle and lower hinge, e.g., set forth in SEQ ID NOs:1, 2 and 3, respectively (see Table 2). Fc regions may also comprise one or more of an IgG2 upper, middle and lower hinge, e.g., set forth in SEQ ID NOs:5, 2 and 6, respectively (the middle hinge of IgG1 and IgG2 have the same aa sequence/see Table 2). Fc regions may also comprise one or more of an IgG3 upper, middle and lower hinge, e.g., set forth in SEQ ID NOs:8, 9 and 10, respectively (Table 2). Fc regions may also comprise one or more of an IgG4 upper, middle and lower hinge, e.g., set forth in SEQ ID NOs:12, 13 and 14, respectively (Table 2). Fc regions may also comprise one or more mouse Ig sequences or IgA1 or IgA2 sequences.

[0487] A first and/or a second Fc region of a TFcA may also comprise an aa sequence of an upper, middle, or lower hinge having an aa sequence that differs from a naturally occurring sequence, such as a sequence set forth herein (e.g., SEQ ID NOs:1-14) comprising up to 1, 2, 3, 4, or 5 aa modifications, e.g., aa substitutions, deletions or additions. For example, the following IgG1 upper hinges may be used:

[0488] EPKSCDKTCC (SEQ ID NO: 16; corresponds to SEQ ID NO: 1 with the aa substitutions H224C and T225C (underlined)) and

[0489] EPKSCDKCHT (SEQ ID NO: 17; corresponds to SEQ ID NO: 1 with the aa substitution T223C (underlined)).

[0490] The amino acid numbering of the hinge residues referred to herein is according to their numbering in a full length antibody (EU numbering; see FIG. 2).

[0491] In one embodiment, the first and/or the second hinge of a TFcA is a full length wild type IgG1 hinge comprising the following aa sequence:

(SEQ ID NO: 4)
EPKSCDKTHTCPPCPAPELLG.

[0492] The first and/or the second hinge of a TFcBA may also consist of an IgG1 hinge comprising up to 1, 2, 3, 4, or 5 aa modifications, e.g., aa substitutions, deletions or additions, relative to SEQ ID NO:4. For example, the following IgG1 hinges may be used:

EPKSCDKTCCCPPCPAPELLG (SEQ ID NO: 18; corresponds to SEQ ID NO: 4 with the aa substitutions H224C and T225C); and
[sequence omitted] (SEQ ID NO: 19; corresponds to SEQ ID NO: 4 with the aa substitution T223C).

[0493] In one embodiment, the first and/or the second hinge of a TFcA is a hybrid hinge, i.e., a hinge that comprises portions from different IgG subclasses. In one embodiment, a hinge comprises an upper hinge from IgG1 and a middle and lower hinge from IgG4, and may, e.g., consist of the following aa sequence:

[0494] [sequence omitted] (SEQ ID NO:20; upper case residues represents IgG1 sequences and lower case residues represent IgG4 sequences).

[0495] The first and/or the second hinge of a TFcBA may also be a hybrid hinge comprising the aa sequence set forth in SEQ ID NO:20, comprising up to 1, 2, 3, 4, or 5 aa modifications, e.g., aa substitutions, deletions or additions. For example, the following IgG1/IgG4 hybrid hinges may be used:

[0496] EPKSCDKTCCcpscpapeflg (SEQ ID NO:21; corresponds to SEQ ID NO:20 with the aa substitutions H224C and T225C; upper case residues represent IgG1 sequences and lower case residues represent IgG4 sequences); and

[0497] EPKSCDKCHTcpscpapeflg (SEQ ID NO:22; corresponds to SEQ ID NO:20 with the aa substitution T223C).

[0498] In certain embodiments, the first and/or the second Fc region comprises a portion of a hinge instead of a full length hinge. For example, a first and/or a second Fc region of a TFcBA may comprise a hinge lacking the upper, middle and/or lower hinge. In certain embodiments, an Fc region comprises a middle and lower hinge, but does not comprise an upper hinge. An exemplary aa sequence of an IgG1 middle and lower hinge is the following:

(SEQ ID NO: 23)
CPPCPAPELLG.

[0499] An exemplary aa sequence of an IgG4 middle and lower hinge is the following:

(SEQ ID NO: 24)
CPSCPAPEFLG.

[0500] A summary of the aa numbers of the hinges and portions thereof provided above is set forth in Table 4. Alignments of the IgG1 and IgG1/IgG4 hybrid hinges are set forth in FIG. 2.

TABLE 4
SEQ ID NOs of exemplary hinges and subdomains thereof

| | | | IgG1/IG4 |
|---|---|---|---|
| | | | hybrid |
| | IgG1 | IgG4 | hinge |
| Upper hinge | SEQ ID NO: 1 | SEQ ID NO: 12 | SEQ ID NO: 1 |
| Upper hinge | SEQ ID NO: 16 | — | SEQ ID NO: 16 |
| with | | | |
| H224C/T225C | | | |
| Upper hinge | SEQ ID NO: 17 | — | SEQ ID NO: 17 |
| with T223C | | | |
| Middle hinge | SEQ ID NO: 2 | SEQ ID NO: 13 | SEQ ID NO: 13 |
| Lower hinge | SEQ ID NO: 3 | SEQ ID NO: 14 | SEQ ID NO: 14 |
| Middle and | SEQ ID NO: 23 | SEQ ID NO: 24 | SEQ ID NO: 24 |
| lower hinge | | | |
| Complete hinge | SEQ ID NO: 4 | SEQ ID NO: 15 | SEQ ID NO: 20 |
| Complete hinge | SEQ ID NO: 18 | — | SEQ ID NO: 21 |
| with | | | |
| H224C/T225C | | | |
| Complete hinge | SEQ ID NO: 19 | — | SEQ ID NO: 22 |
| with T223C | | | |

[0501] Cysteines may also be introduced at positions other than T223, H224 and T225 in a hinge, e.g., by the substitution K222C, described in WO2010/064090.

[0502] Additional hinges that may be used in TFcAs include hIgG1 hinge variants comprising one of the following aa sequences (FIG. 2):

(SEQ ID NO: 263; hIgG1 Extra Prolines v1)
PPPPCDKTHTCPPCP
(SEQ ID NO: 264; hIgG1 Extra Prolines v2)
EPKSCPPPCPPCP
(SEQ ID NO: 265; hIgG1-like double core)
EPKSCPPCPCPPCP

[0503] Hinges that may be used in TFcAs may also include mouse hinge sequences, e.g., mIgG1 and mIgG2 sequences, and hybrids thereof. An exemplary mIgG1/mIgG2A hinge comprises the aa sequence

(SEQ ID NO: 267)
VPRDCTIKPCPPCP.

[0504] Other hinges that may be used in TFcAs comprise an IgG2 hinge or variant thereof, such as a variant comprising one of the following amino acid sequences (FIG. 2):

(SEQ ID NO: 268; hIgG2 C232P)
ERKPCVECPPCP
(SEQ ID NO: 269; hIgG2 C233P)
ERKCPVECPPCP

[0505] In certain embodiments, a TFcA comprises an IgA, e.g., IgA2, hinge or variant thereof. Exemplary IgA2 hinge variants include those comprising one of the following aa sequences (FIG. 2):

(SEQ ID NO: 271; hIgA2 Modified v1)
EPKSCPCPPPPPCCP
(SEQ ID NO: 272; hIgA2 modified v2)
EPKSCPCPPPPCCP
(SEQ ID NO: 273; hIgA2 Modified v3)
EPKSCPVPPPPPCCP

[0506] Other variations, e.g., aa modifications, may also be introduced into a hinge. For example, the substitution S228P may be made in the middle hinge of IgG4 to stabilize the interaction between two Fc regions comprising IgG4 middle hinges.

[0507] A TFcA comprising IgG2 sequences in its Fab domain may comprise the mutation C129S in the heavy chain portion of the Fab domain, which is a mutation of the cysteine that normally links the heavy chain to the light chain. Such a mutation will encourage the formation of a disulfide bridge between the light chain cysteine and C232 in the heavy chain, and C233 will pair with C233 of the neighboring hinge (in addition to the two disulfides in the CPPCP motif (SEQ ID NO: 2)).

[0508] In certain embodiments, the following variant hinges are used:

(SEQ ID NO: 248)
PRDCGCKPCICT,
(SEQ ID NO: 249)
PKSCGCKPCICT,
(SEQ ID NO: 250)
PKSCGCKPCICP,
(SEQ ID NO: 251)
PRDCGCKPCPPCP,
(SEQ ID NO: 252)
PRDCGCHTCPPCP,
(SEQ ID NO: 253)
PKSCDCHCPPCP,
and
(SEQ ID NO: 254)
RKCCVECPPCP.

[0509] In certain embodiments, a TFcBA does not comprise a first or a second hinge. For example, instead of a first hinge, a TFcBA may comprise a connecting linker that links the first binding site to the first CH2 domain. Such a linker may be a Gly-Ser linker as further described herein in the context of TFc linkers. In certain embodiments, a connecting linker comprises a (G₄S) 2 (SEQ ID NO: 494) or (G₄S)₃ (SEQ ID NO: 495) or (G₄S)₄ (SEQ ID NO: 496) sequence. Other peptide sequences may also be used as a connecting linker provided that they provide the required flexibility and rigidity of certain parts of the linker. In certain embodiments, a TFcBA does not comprise a second hinge, but comprises a connecting linker instead, which may be a Gly-Ser linker similar to that of the TFc linker.

### Exemplary CH2 Domains

[0510] In certain embodiments, an Fc region comprises a CH2 domain. A CH2 domain may be from a human IgG1, IgG2, IgG3 or IgG4 or from a combination thereof (a “hybrid” CH2 domain). An exemplary full length wild type IgG1 CH2 domain consists of the following aa sequence:

(SEQ ID NO: 261)
GPSVFLFPPKPKDTLMISRTPEVTCVVVDVSHEDPEVKFNWYVDGVEVHN
AKTKPREEQYNSTYRVVSVLTVLHQDWLNGKEYKCKVSNKALPAPIEKTI
SKAK.

[0511] An exemplary full length IgG1 CH2 domain with an N297Q substitution to reduce the glycosylation at that residue, such that the variant is substantially aglycosylated when expressed in a mammalian cell, consists of the following amino acid sequence:

(SEQ ID NO: 25)
GPSVFLFPPKPKDTLMISRTPEVTCVVVDVSHEDPEVKFNWYVDGVEVHN
AKTKPREEQYQSTYRVVSVLTVLHQDWLNGKEYKCKVSNKALPAPIEKTI
SKAK.

[0512] An exemplary full length wild type IgG4 CH2 domain comprises the following aa sequence:

(SEQ ID NO: 262)
GPSVFLFPPKPKDTLMISRTPEVTCVVVDVSQEDPEVQFNWYVDGVEVHN
AKTKPREEQFNSTYRVVSVLTVLHQDWLNGKEYKCKVSNKGLPSSIEKTI
SKAK.

[0513] An exemplary full length IgG4 CH2 domain with a T299K substitution to reduce the glycosylation at residue 297, such that the variant is substantially aglycosylated when expressed in a mammalian cell, consists of the following amino acid sequence:

(SEQ ID NO: 26)
GPSVFLFPPKPKDTLMISRTPEVTCVVVDVSQEDPEVQFNWYVDGVEVHN
AKTKPREEQFNSKYRVVSVLTVLHQDWLNGKEYKCKVSNKGLPSSIEKTI
SKAK.

[0514] A CH2 domain may also comprise an aa sequence that differs from that of IgG1, IgG2, IgG3 or IgG4 in one or more aa modifications, e.g., aa deletions, additions or substitutions. In certain embodiments, a CH2 domain comprises an aa sequence that differs from that of a naturally occurring (or wild type) CH2 domain (e.g., SEQ ID NO:261 and 262) or from SEQ ID NOs:25 or 26 in at most, 1, 2, 3, 4, 5, 6, 7, 8, 9, 10, 15, 20, 25 or 30 aas. In certain embodiments, a CH2 domain comprises an aa sequence that is at least 70%, 75%, 80%, 85%, 90%, 95%, 97%, 98% or 99% identical or similar to that of a naturally occurring CH2 domain (e.g., SEQ ID NO:261 and 262) or SEQ ID NOs:25 or 26. Exemplary modifications include other modifications to reduce or remove glycosylation at aa 297. A modification may generally comprise an amino acid substitution in any of EU positions 297-299 (aa motif NXT) such that the variant is substantially aglycosylated when expressed in a mammalian cell. In addition to T299K, other substitutions that may be made at aa 299 to reduce glycosylation at aa 297 include T299S, T299A, T299N, T299G, T299Y, T299C, T299H, T299E, T299D, T299R, T299G, T299I, T299L, T299M, T299F, T299P, T299W, and T299V, as described, e.g., in WO/2005/018572.

[0515] Other aa changes may affect antibody effector functions, e.g., ADCC and CDC, or stability or other desired antibody characteristic. For example, FcγRI binding to an IgG1 Fc region may be modulated by modifying Leu235 and/or Gly237. Binding to Clq for CDC may be modulated by substitution of Ala330 and/or Pro331. Other modifications that may be made to CH2 domains to modulate the effector functions include substitutions at one or more aas at positions 234 to 238, 253, 279, 310, 318, 320, and 322.

### Exemplary CH3 Domains

[0516] In certain embodiments, the first and/or the second Fc region of a TFcA, e.g., a TFcBA, comprises a CH3 domain. A CH3 domain may be from a human immunoglobulin, e.g., an IgG1, IgG2, IgG3 or IgG4, or from a combination thereof (a “hybrid” CH3 domain). An exemplary full length wild type IgG1 CH3 domain comprises the following aa sequence:

(SEQ ID NO: 27)
GQPREPQVYTLPPSRDELTKNQVSLTCLVKGFYPSDIAVEWESNGQPENN
YKTTPPVLDSDGSFFLYSKLTVDKSRWQQGNVFSCSVMHEALHNHYTQKS
LSLSPGK.

[0517] In certain embodiments, variations of SEQ ID NO:27 may be used. For example, the C-terminal lysine of the CH3 domain may be deleted (see SEQ ID NO:28 in FIG. 3). In other embodiments, a CH3 domain comprises the aa substitutions D356E and L358M and the C-terminal lysine may be present or absent (SEQ ID Nos:29 and 30 respectively, and shown in FIG. 3).

[0518] In certain embodiments, the first and/or the second CH3 domains of a TFcA are modified to enhance the association of the first and the second Fc comprising the first and the second CH3 domains, respectively. Such CH3 modifications are referred to herein as Association Enhancing Modifications (“AEMs”). As further described in the Examples, it has been unexpectedly found that the addition of a TFc linker joining the two Fc regions of an Ab further enhances the ability of Abs having AEMs to properly assemble and increases their stability.

[0519] Exemplary AEM modifications that can be used are modifications that create “knobs-into-holes” and which are described, e.g., in U.S. Pat. No. 7,183,076. In this strategy, the CH3 domains are engineered to give one a protruding “knob” or “bump” and the other a complementary “hole,” thereby favoring the association of the CH3 domains. An exemplary aa modification to a CH3 domain that creates a “hole” is the combination of aa substitutions T366S, L368A and Y407V (e.g., in SEQ ID NOs:31-34; FIG. 3). Such a CH3 domain with a “hole” will dimerize favorably with a CH3 domain having a “knob” or “bump,” e.g., a CH3 domain comprising the amino acid substitution T366W (e.g., in SEQ ID NOs:35-38; FIG. 3). This pair of knob/hole mutations is referred to herein as “AEM module 1” or “AEM 1,” of which the first and the second CH3 domains are referred to as “AEM 1.1” and “AEM 1.2,” respectively.

[0520] In another embodiment, one of the two CH3 domains of a TFcA comprises a hole created by the substitution Y407T (e.g., in SEQ ID NOs:39-42; FIG. 3) and the other CH3 domain comprises a knob created by the substitution T366Y (e.g., in SEQ ID NOs:43-46; FIG. 3). This second pair of knob/hole mutations is referred to as “AEM module 2” or “AEM 2,” of which the first and the second CH3 domains are referred to as “AEM 2.1” and “AEM 2.2,” respectively.

[0521] The association between two CH3 domains may also be enhanced by mechanisms other than those creating typical knob/holes, e.g., by electrostatic modifications. In one embodiment, one of the two CH3 domains of a TFcA comprises the combination of substitutions S364H and F405A (e.g., in SEQ ID NOs:47-50; FIG. 3) and the other CH3 domain comprises the combination of substitutions Y349T and T394F (e.g., in SEQ ID NOs:51-54; FIG. 3). This third pair of modifications is referred to herein as “AEM module 3” or “AEM 3,” of which the first and the second CH3 domains are referred to as “AEM 3.1” and “AEM 3.2,” respectively.

[0522] In one embodiment, one of the two CH3 domains of a TFcA comprises the combination of substitutions K370D, K392D and K409D (e.g., in SEQ ID NOs:55-58; FIG. 3) and the other CH3 domain comprises the combination of substitutions E (or D)356K, E357K and D399K (e.g., in SEQ ID NOs:59-62; FIG. 3). This fourth pair of modifications is referred to herein as “AEM module 4” or “AEM 4,” of which the first and the second CH3 domains are referred to as “AEM 4.1” and “AEM 4.2,” respectively. The aa at position 356 may be either an E or a D, depending on the sequence that is used, and therefore the substitution at that position is referred to as “E (or D)356.”

[0523] In certain embodiments, the first and/or the second CH3 domains of a TFcA comprise one or more aa modifications resulting in the addition of one or more Cysteines that allow the formation of one or more disulfide bonds between the two CH3 or Fc domains. In one embodiment, one of the two CH3 domains of a TFcA comprises the substitution Y349C (e.g., in SEQ ID NOs:63-66; FIG. 3) and the other CH3 domain comprises the substitution S354C (e.g., in SEQ ID NOs:67-70; FIG. 3). This pair of disulfide forming modifications is referred to herein as “DiS module 1” or “DiS 1,” of which the first and the second CH3 domains are referred to as “DiS 1.1” and “DiS 1.2,” respectively.

[0524] In other embodiments, a cysteine is added to the C-terminus of each of the two CH3 domains of a TFcA, to thereby form a disulfide bond between the two CH3 domains. For example, one of the two CH3 domains may comprise the substitution of the carboxyl terminal aas “PGK” with “KSCDKT” (SEQ ID NO: 167) (e.g., in SEQ ID NOs:71-72; FIG. 3) and the other CH3 domain may comprise the substitution of the carboxyl-terminal aas “PGK” with “GEC” (SEQ ID NO: 168) (e.g., in SEQ ID NOs:73-74; FIG. 3).

[0525] In certain embodiments, a CH3 domain comprises a combination of two or more aa change(s). For example, one or more AEMs may be combined with one or more DiS modifications. In an exemplary embodiment, a CH3 domain comprises the hole mutations T366S, L368A, Y407V and the disulfide bond generating mutation Y349C (AEM 1.1+DiS 1.1). Such a CH3 domain may be combined in a TFc with a CH3 domain comprising the knob mutation T366W and the disulfide bond generating mutation S354C (AEM 1.2+DiS 1.2). Exemplary aa sequences comprising this combination of substitutions include SEQ ID NOs:75-82 (FIG. 3).

[0526] Exemplary combinations of AEMs and DiSs that are made in CH3 domains to favor the association of CH3 domains or Fc regions comprising these are set forth in Table 5, wherein a “yes” indicates a combination that may be used.

TABLE 5
Exemplary combinations of AEM and DiS modifications (“KSCDKT” and
“GEC” disclosed as SEQ ID NOS 167 and 168, respectively)

| | | | AEM module 1 | | | | | | AEM module 4 | |
|---|---|---|---|---|---|---|---|---|---|---|
| | | | 1.1 | | | | AEM module 3 | | 4.1 | 4.2 |
| | | | T366S/ | | AEM module 2 | | 3.1 | 3.2 | K370D/ | D356K*/ |
| | | | L368A/ | 1.2 | 2.1 | 2.2 | S364H/ | Y349T/ | K392D/ | E357K/ |
| | | | Y470V | T366W | Y407T | T366Y | F405A | T394F | K409D | D399K |
| DiS 1 | 1.1 | Y349C | yes | yes | yes | yes | yes | yes | yes | yes |
| | 1.2 | S354C | yes | yes | yes | yes | yes | yes | yes | yes |
| DiS 2 | 2.1 | C. term. | yes | yes | yes | yes | yes | yes | yes | yes |
| | | KSCDKT | | | | | | | | |
| | 2.2 | C term. | yes | yes | yes | yes | yes | yes | yes | yes |
| | | GEC | | | | | | | | |

*With respect to the sequences that have an E at position 356 (e.g., SEQ ID NOs: 29 and 30), this mutation is E356K.

[0527] Aa sequences of exemplary IgG1 CH3 domains with an AEM and/or DiS comprise SEQ ID NOs:31-98. An alignment of these aa sequences is provided in FIG. 3, and a description of these sequences is provided in Table 6. The CH3 domains in Table 6 and FIG. 3 are organized according to their AEM module (number 1, 2, 3 or 4) and their DiS module (number 1 or 2). Compatible CH3 domains are listed as “1” and “2” preceded by the module number.

TABLE 6
SEQ ID NOs for IgG1 CH3 domains with an AEM and/or a DiS (“KSCDKT”
and “GEC” disclosed as SEQ ID NOS 167 and 168, respectively)

| | | | | | Wild type with |
|---|---|---|---|---|---|
| | | | | | D356E and |
| | | | | | L358M; |
| | | | Wild type without | Wild type with | without a |
| | | Wild type | terminal lysine | D356E and L358M | terminal lysine |
| | | SEQ ID | SEQ ID NO: 28 | SEQ ID NO: 29 | SEQ ID NO: 30 |
| | | NO: 27 | | | |
| AEM 1 | AEM 1.1 T366S/L368A/ | SEQ ID | SEQ ID NO: 32 | SEQ ID NO: 33 | SEQ ID NO: 34 |
| | Y407V | NO: 31 | | | |
| | AEM 1.2 | SEQ ID | SEQ ID NO: 36 | SEQ ID NO: 37 | SEQ ID NO: 38 |
| | T366W | NO: 35 | | | |
| AEM 2 | AEM 2.1 | SEQ ID | SEQ ID NO: 40 | SEQ ID NO: 41 | SEQ ID NO: 42 |
| | Y407T | NO: 39 | | | |
| | AEM 2.2 | SEQ ID | SEQ ID NO: 44 | SEQ ID NO: 45 | SEQ ID NO: 46 |
| | T366Y | NO: 43 | | | |
| AEM 3 | AEM 3.1 S364H/F405A | SEQ ID | SEQ ID NO: 48 | SEQ ID NO: 49 | SEQ ID NO: 50 |
| | | NO: 47 | | | |
| | AEM 3.2 Y349T/T394F | SEQ ID | SEQ ID NO: 52 | SEQ ID NO: 53 | SEQ ID NO: 54 |
| | | NO: 51 | | | |
| AEM 4 | AEM 4.1 K370D/K392D/ | SEQ ID | SEQ ID NO: 56 | SEQ ID NO: 57 | SEQ ID NO: 58 |
| | K409D | NO: 55 | | | |
| | AEM 4.2 D356K*/E357K/ | SEQ ID | SEQ ID NO: 60 | SEQ ID NO: 61 | SEQ ID NO: 62 |
| | D399K | NO: 59 | | | |
| DiS 1 | DiS 1.1 | SEQ ID | SEQ ID NO: 64 | SEQ ID NO: 65 | SEQ ID NO: 66 |
| | Y349C | NO: 63 | | | |
| | DiS 1.2 | SEQ ID | SEQ ID NO: 68 | SEQ ID NO: 69 | SEQ ID NO: 70 |
| | S354C | NO: 67 | | | |
| DiS 2 | DiS 2.1 | SEQ ID | — | SEQ ID NO: 72 | — |
| | C. term. KSCDKT | NO: 71 | | | |
| | DiS 2.2 | SEQ ID | — | SEQ ID NO: 74 | — |
| | C. term. GEC | NO: 73 | | | |
| AEM 1 + | AEM 1.1 + DiS 1.1 | SEQ ID | SEQ ID NO: 76 | SEQ ID NO: 77 | SEQ ID NO: 78 |
| DiS 1 | Y349C/T366S/ | NO: 75 | | | |
| | L368A/Y407V | | | | |
| | AEM 1.2 + DiS 1.2 | SEQ ID | SEQ ID NO: 80 | SEQ ID NO: 81 | SEQ ID NO: 82 |
| | S354C/T366W | NO: 79 | | | |
| AEM 1 + | AEM 1.1 + DiS 2.1 | SEQ ID | — | SEQ ID NO: 84 | — |
| DiS 2 | T366S/L368A/ | NO: 83 | | | |
| | Y407V/C. term. KSCDKT | | | | |
| | AEM 1.2 + DiS 2.2 | SEQ ID | — | SEQ ID NO: 86 | — |
| | T366W/C term. GEC | NO: 85 | | | |
| AEM 1 + | AEM 1.1 + DiS 2.2 | SEQ ID | — | SEQ ID NO: 88 | — |
| DiS | T366S/L368A/ | NO: 87 | | | |
| 2Inv | Y407V/C term. GEC | | | | |
| | AEM 2.1 + DiS 2.1 | SEQ ID | — | SEQ ID NO: 90 | — |
| | T366W/C. term. KSCDKT | NO: 89 | | | |
| AEM 3 + | AEM 3.1 + DiS 2.1 | SEQ ID | — | SEQ ID NO: 92 | — |
| DiS 2 | S364H/F405A/C term. | NO: 91 | | | |
| | KSCDKT | | | | |
| | AEM 3.2 + DiS 2.2 | SEQ ID | — | SEQ ID NO: 94 | — |
| | Y349T/T394F/C term. GEC | NO: 93 | | | |
| AEM 4 + | AEM 4.1 + DiS 2.1 | SEQ ID | — | SEQ ID NO: 96 | — |
| DiS 2 | K370D/K392D/ | NO: 95 | | | |
| | K409D/C. term. KSCDKT | | | | |
| | AEM 4.2 + DiS 2.2 | SEQ ID | — | SEQ ID NO: 98 | — |
| | D356K*/E357K/ | NO: 97 | | | |
| | D399K/C term. GEC | | | | |

*With respect to the sequences that have an E at position 356 (e.g., SEQ ID NOs: 29 and 30), this mutation is E356K.

[0528] Other CH3 AEMs that may be used in TFcAs include the following pairs of aa modifications, wherein the substitution(s) to the first and the second member of a pair of AEM modifications are separated by “and”:

1) F405A and 1394F; S364D and Y349K; S364E and 1368K; S364E Y349K; S364F and K370G; S364H and Y349K; S364H and Y349T; S364Y and K370G; T411K and K370E; V397S/F405A and T394F; K370R/T411K and K370E/T411E; L351E/S364D and Y349K/1351K; L351E/S364E and Y349K/L351K; L351E/T366D and L351K/T366K; P395T/V397S/F405A and 1394F; S364D/K370G and S364Y/K370R S364D/T394F and Y349K/F405A; S364E/F405A and Y349K/T394F; S364E/F405S and Y349K/T394Y; S364E/T411E and Y349K/D401K; S364H/D401K and Y349T/T411E; S364H/T394F and Y349T/F405A; Y349C/S364E and Y349K/S354C; L351E/S364D/F405A and Y349K/L351K/T394F; L351K/S364H/D401K and Y349T/L351E/T411E; S364/T411E/F405A and Y349K/F394F/D401K; S364H/D401K/F405A and Y349T/L394E/T411E; S364H/F405A/T411E and Y349K/T394F/D401K (WO2011/028952).
2) T366W and Y407A; T366W and T366S; L368A and Y407Y; K409E and D399K; K409E, and D399R; and K409D and D399K; K409D and D399K; K392E and D399R; K392E and D399K; K392D and D399R; and K392D and D399R (WO2009/089004).
3) T366W and Y407A; F405A and 1394W; Y407T and T366Y/T366Y/F405A and T394W/Y407T; T366W/F405W and T394S/Y407A; F405W/Y407A and T366W/T394S; and F405W and T394S (U.S. Pat. No. 7,642,228).

[0529] Generally, any other AEM or DiS described in the art may be used.

[0530] A CH3 domain may also comprise an aa sequence that differs from that of a CH3 aa sequence provided herein, e.g., SEQ ID NOs:27-98, in at most, 1, 2, 3, 4, 5, 6, 7, 8, 9, 10, 15, 20, 25 or 30 aas. In certain embodiments, a CH3 domain comprises an aa sequence that is at least 70%, 75%, 80%, 85%, 90%, 95%, 97%, 98% or 99% identical to a CH3 aa sequence provided herein, e.g., SEQ ID NOs:27-98. As several antibody effector functions, e.g., ADCC and CDC are mediated at least in part through areas in CH3 domains, aa changes that can be made to CH3 domains include changes affecting the effector function(s) of Fc regions. Exemplary modifications that may be made to CH3 domains are further described herein.

### Exemplary Fc Regions

[0531] An Fc region of a TFcA comprises one or more of a hinge, CH2 domain, CH3 domain and CH4 domain, which may be full length or not and which may be wild type or with aa modifications. The Fc domains may be from human immunoglobulins (“Igs”) or non-human Igs, e.g., mouse Igs, and may be from any type or isotype of an Ig, such as an IgG (e.g., IgG1, IgG2, IgG3 and IgG4) or IgA (e.g., IgA1 and IgA2).

[0532] In certain embodiments, a TFcA comprises a TFc that comprises a first and/or a second Fc region from a human immunoglobulin, e.g., IgG1. An Fc region preferably comprises in a contiguous amino to carboxyl terminal order: an IgG1 hinge or portion thereof (e.g., a core and lower hinge), an IgG1 CH2 domain and an IgG1 CH3 domain. Fc regions may comprise any combination of an IgG1 hinge (or portion thereof), IgG1 CH2 domain and IgG1 CH3 domains set forth herein, provided that the TFcA has the desired activity and stability.

[0533] In certain embodiments, a TFc comprises a first and/or a second Fc region that is a hybrid Fc region. A hybrid Fc region may comprise Fc domains from two or more IgG subclasses IgG1, IgG2, IgG3 and IgG4. In one embodiment, a hybrid Fc region comprises in a contiguous amino to carboxyl terminal order: an IgG1 upper hinge, an IgG4 middle and lower hinge, an IgG4 CH2 domain and an IgG1 CH3 domain. Exemplary IgG1/IgG4 hybrid Fc regions may comprise any combination of an IgG1 upper hinge, IgG4 core hinge, IgG4 lower hinge, IgG 4 CH2 domain and IgG1 CH3 domains set forth herein, provided that the TFcA comprising the TFc has the desired activity and stability.

[0534] In certain embodiments, an Fc region does not comprise a full length hinge. For example, a TFcBA may comprise a first Fc region comprising a full length hinge and a second Fc region comprising a hinge that consists of the core and/or lower hinge and does not comprise an upper hinge.

[0535] In certain embodiments, a TFc comprises a hinge that has been modified to comprise a cysteine for forming a disulfide bond with another cysteine in the other Fc region, to thereby stabilize the TFc. In one embodiment, an IgG1 hinge comprises the substitutions H224C and T225C (e.g., SEQ ID NO:18; FIG. 2). In another embodiment, a hinge comprises the substitution T223C (e.g., SEQ ID NO: 19; FIG. 2).

[0536] In one embodiment, a TFcA comprises an IgG1 TFc comprising in amino to carboxyl terminal order: i) an IgG1 hinge selected from the group of hinges consisting of the aa sequences set forth in SEQ ID NO:4 (full length IgG1 hinge), SEQ ID NO:18 (SEQ ID NO:4 with H224C/T225C), SEQ ID NO:19 (SEQ ID NO:4 with T223C) and SEQ ID NO:23 (middle and lower IgG1 hinge only); ii) an IgG1 CH2 domain comprising SEQ ID NO:261 or 25; and iii) a CH3 domain comprising an aa sequence selected from the group of CH3 domains consisting of an aa sequence set forth in SEQ ID NOs:31-98 (FIG. 3). In another embodiment, a TFcA comprises an IgG1/IgG4 hybrid TFc comprising in amino to carboxyl terminal order: i) a hinge selected from the group of hinges consisting of an aa sequence set forth in SEQ ID NO:20 (IgG1 upper hinge and IgG4 core and lower hinge), SEQ ID NO:21 (SEQ ID NO:20 with H224C/T225C), SEQ ID NO:22 (SEQ ID NO:20 with T223C) and SEQ ID NO:24 (middle and lower IgG4 hinge only); ii) an IgG4 CH2 domain comprising SEQ ID NO:262 or 26; and iii) a CH3 domain comprising an aa sequence selected from the group of CH3 domains consisting of the aa sequences SEQ ID NOs:31-98 (FIG. 3). Exemplary combinations of hinges and CH3 domains are set forth in Table 7, wherein a “yes’indicates a combination that may be used, and wherein compatible modifications are separated from others by a blank row.

TABLE 7
Exemplary combinations of hinges and CH3 domains for forming Fc regions

| | | Hinge | | | | | | | |
|---|---|---|---|---|---|---|---|---|---|
| | | | IgG1 | | | | Hybrid | | |
| | | | H224C/ | IgG1 | Partial | | H224C/ | Hybrid | Partial |
| | | IgG1 | T225C | T223C | IgG1 | Hybrid | T225C | T223C | IgG4 |
| | | SEQ ID | SEQ ID | SEQ ID | SEQ ID | SEQ ID | SEQ ID | SEQ ID | SEQ ID |
| | | NO: 1 | NO: 18 | NO: 19 | NO: 23 | NO: 20 | NO: 21 | NO: 22 | NO: 24 |
| CH3 | AEM 1.1 | yes | yes | yes | yes | yes | yes | yes | yes |
| | SEQ ID | | | | | | | | |
| | NOs: 31-34 | | | | | | | | |
| | AEM 1.2 | yes | yes | yes | yes | yes | yes | yes | yes |
| | SEQ ID | | | | | | | | |
| | NOs: 35-38 | | | | | | | | |
| | AEM 2.1 | yes | yes | yes | yes | yes | yes | yes | yes |
| | SEQ ID | | | | | | | | |
| | NOs: 39-42 | | | | | | | | |
| | AEM 2.2 | yes | yes | yes | yes | yes | yes | yes | yes |
| | SEQ ID | | | | | | | | |
| | NOs: 43-46 | | | | | | | | |
| | AEM 3.1 | yes | yes | yes | yes | yes | yes | yes | yes |
| | SEQ ID | | | | | | | | |
| | NOs: 47-50 | | | | | | | | |
| | AEM 3.2 | yes | yes | yes | yes | yes | yes | yes | yes |
| | SEQ ID | | | | | | | | |
| | NOs: 51-54 | | | | | | | | |
| | AEM 4.1 | yes | yes | yes | yes | yes | yes | yes | yes |
| | SEQ ID | | | | | | | | |
| | NOs: 55-58 | | | | | | | | |
| | AEM 4.2 | yes | yes | yes | yes | yes | yes | yes | yes |
| | SEQ ID | | | | | | | | |
| | NOs: 59-62 | | | | | | | | |
| | DiS 1.1 | yes | yes | yes | yes | yes | yes | yes | yes |
| | SEQ ID | | | | | | | | |
| | NOs: 63-66 | | | | | | | | |
| | DiS 1.2 | yes | yes | yes | yes | yes | yes | yes | yes |
| | SEQ ID | | | | | | | | |
| | NOs: 67-70 | | | | | | | | |
| | DiS 2.1 | yes | yes | yes | yes | yes | yes | yes | yes |
| | SEQ ID | | | | | | | | |
| | NOs: 71-72 | | | | | | | | |
| | DiS 2.2 | yes | yes | yes | yes | yes | yes | yes | yes |
| | SEQ ID | | | | | | | | |
| | NOs: 73-74 | | | | | | | | |
| | AEM 1.1 | yes | yes | yes | yes | yes | yes | yes | yes |
| | DiS 1.1 | | | | | | | | |
| | SEQ ID | | | | | | | | |
| | NOs: 75-78 | | | | | | | | |
| | AEM 1.2 | yes | yes | yes | yes | yes | yes | yes | yes |
| | DiS 1.2 | | | | | | | | |
| | SEQ ID | | | | | | | | |
| | NOs: 79-82 | | | | | | | | |
| | AEM 1.1 | yes | yes | yes | yes | yes | yes | yes | yes |
| | DiS 2.1 | | | | | | | | |
| | SEQ ID | | | | | | | | |
| | NOs: 83-84 | | | | | | | | |
| | AEM 1.2 | yes | yes | yes | yes | yes | yes | yes | yes |
| | DiS 2.2 | | | | | | | | |
| | SEQ ID | | | | | | | | |
| | NOs: 85-86 | | | | | | | | |
| | AEM 1.1 | yes | yes | yes | yes | yes | yes | yes | yes |
| | DiS 2.2 | | | | | | | | |
| | SEQ ID | | | | | | | | |
| | NOs: 87-88 | | | | | | | | |
| | AEM 1.2 | yes | yes | yes | yes | yes | yes | yes | yes |
| | DiS 2.1 | | | | | | | | |
| | SEQ ID | | | | | | | | |
| | NOs: 89-90 | | | | | | | | |
| | AEM 3.1 | yes | yes | yes | yes | yes | yes | yes | yes |
| | DiS 2.1 | | | | | | | | |
| | SEQ ID | | | | | | | | |
| | NOs: 91-92 | | | | | | | | |
| | AEM 3.2 | yes | yes | yes | yes | yes | yes | yes | yes |
| | DiS 2.2 | | | | | | | | |
| | SEQ ID | | | | | | | | |
| | NOs: 93-94 | | | | | | | | |
| | AEM 4.1 | yes | yes | yes | yes | yes | yes | yes | yes |
| | DiS 2.1 | | | | | | | | |
| | SEQ ID | | | | | | | | |
| | NOs: 95-96 | | | | | | | | |
| | AEM 4.2 | yes | yes | yes | yes | yes | yes | yes | yes |
| | DiS 2.2 | | | | | | | | |
| | SEQ ID | | | | | | | | |
| | NOs: 97-98 | | | | | | | | |

In one emb odiment, a TFcA comprises a TFc that comprises an IgG1 Fc region comprising a hinge comprising SEQ ID NO:4, a CH2 domain comprising SEQ ID NO:25 and a CH3 domain comprising SEQ ID NO:29, and may form, e.g., an IgG1 Fc region comprising SEQ ID NO:99 (see Table 8 and FIG. 4). Other combinations of IgG1 hinges, IgG1 CH2 domain, and IgG1 CH3 domains and exemplary IgG1 Fcs created by such combinations are provided in Table 8. The aa sequences of the exemplary IgG1 Fcs listed in Table 8 (SEQ ID NOs:99-132) are provided in FIG. 4. Compatible IgG1 Fcs in Table 8 are separated from other IgG1 Fcs by a blank row.

TABLE 8
SEQ ID NOs of exemplary combinations of IgG1 hinges,
CH2 domain and CH3 domain forming exemplary IgG1 Fcs

| IgG1 Hinge | IgG1 CH2 | IgG1 CH3 | IgG1 Fc |
|---|---|---|---|
| SEQ ID NO: 4 | SEQ ID NO: 25 | SEQ ID NO: 29 | SEQ ID NO: |
| | | | 99 |
| SEQ ID NO: 23 | SEQ ID NO: 25 | SEQ ID NO: 29 | SEQ ID NO: |
| | | | 100 |
| SEQ ID NO: 4 | SEQ ID NO: 25 | SEQ ID NO: 33 | SEQ ID NO: |
| | | | 101 |
| SEQ ID NO: 23 | SEQ ID NO: 25 | SEQ ID NO: 37 | SEQ ID NO: |
| | | | 102 |
| SEQ ID NO: 4 | SEQ ID NO: 25 | SEQ ID NO: 37 | SEQ ID NO: |
| | | | 103 |
| SEQ ID NO: 23 | SEQ ID NO: 25 | SEQ ID NO: 33 | SEQ ID NO: |
| | | | 104 |
| SEQ ID NO: 4 | SEQ ID NO: 25 | SEQ ID NO: 77 | SEQ ID NO: |
| | | | 105 |
| SEQ ID NO: 23 | SEQ ID NO: 25 | SEQ ID NO: 81 | SEQ ID NO: |
| | | | 106 |
| SEQ ID NO: 4 | SEQ ID NO: 25 | SEQ ID NO: 81 | SEQ ID NO: |
| | | | 107 |
| SEQ ID NO: 23 | SEQ ID NO: 25 | SEQ ID NO: 77 | SEQ ID NO: |
| | | | 108 |
| SEQ ID NO: 4 | SEQ ID NO: 25 | SEQ ID NO: 41 | SEQ ID NO: |
| | | | 109 |
| SEQ ID NO: 23 | SEQ ID NO: 25 | SEQ ID NO: 45 | SEQ ID NO |
| | | | 110 |
| SEQ ID NO: 4 | SEQ ID NO: 25 | SEQ ID NO: 45 | SEQ ID NO: |
| | | | 111 |
| SEQ ID NO: 23 | SEQ ID NO: 25 | SEQ ID NO: 41 | SEQ ID NO: |
| | | | 112 |
| SEQ ID NO: 18 | SEQ ID NO: 25 | SEQ ID NO: 33 | SEQ ID NO: |
| | | | 113 |
| SEQ ID NO: 4 | SEQ ID NO: 25 | SEQ ID NO: 77 | SEQ ID NO: |
| | | | 114 |
| SEQ ID NO: 19 | SEQ ID NO: 25 | SEQ ID NO: 33 | SEQ ID NO: |
| | | | 115 |
| SEQ ID NO: 4 | SEQ ID NO: 25 | SEQ ID NO: 77 | SEQ ID NO: |
| | | | 116 |
| SEQ ID NO: 4 | SEQ ID NO: 25 | SEQ ID NO: 84 | SEQ ID NO: |
| | | | 117 |
| SEQ ID NO: 23 | SEQ ID NO: 25 | SEQ ID NO: 86 | SEQ ID NO: |
| | | | 118 |
| SEQ ID NO: 4 | SEQ ID NO: 25 | SEQ ID NO: 86 | SEQ ID NO: |
| | | | 119 |
| SEQ ID NO: 23 | SEQ ID NO: 25 | SEQ ID NO: 84 | SEQ ID NO: |
| | | | 120 |
| SEQ ID NO: 4 | SEQ ID NO: 25 | SEQ ID NO: 88 | SEQ ID NO: |
| | | | 121 |
| SEQ ID NO: 23 | SEQ ID NO: 25 | SEQ ID NO: 90 | SEQ ID NO: |
| | | | 122 |
| SEQ ID NO: 4 | SEQ ID NO: 25 | SEQ ID NO: 90 | SEQ ID NO: |
| | | | 123 |
| SEQ ID NO: 23 | SEQ ID NO: 25 | SEQ ID NO: 88 | SEQ ID NO: |
| | | | 124 |
| SEQ ID NO: 4 | SEQ ID NO: 25 | SEQ ID NO: 92 | SEQ ID NO: |
| | | | 125 |
| SEQ ID NO: 23 | SEQ ID NO: 25 | SEQ ID NO: 94 | SEQ ID NO: |
| | | | 126 |
| SEQ ID NO: 4 | SEQ ID NO: 25 | SEQ ID NO: 94 | SEQ ID NO: |
| | | | 127 |
| SEQ ID NO: 23 | SEQ ID NO: 25 | SEQ ID NO: 92 | SEQ ID NO: |
| | | | 128 |
| SEQ ID NO: 4 | SEQ ID NO: 25 | SEQ ID NO: 96 | SEQ ID NO: |
| | | | 129 |
| SEQ ID NO: 23 | SEQ ID NO: 25 | SEQ ID NO: 98 | SEQ ID NO: |
| | | | 130 |
| SEQ ID NO: 4 | SEQ ID NO: 25 | SEQ ID NO: 98 | SEQ ID NO: |
| | | | 131 |
| SEQ ID NO: 23 | SEQ ID NO: 25 | SEQ ID NO: 96 | SEQ ID NO: |
| | | | 132 |

[0537] In one embodiment, a TFcA comprises a TFc that comprises an IgG1/IgG4 Fc region comprising a hinge comprising SEQ ID NO:20, a CH2 domain comprising SEQ ID NO:26 and a CH3 domain comprising SEQ ID NO:29, and may form, e.g., an IgG1/IgG4 hybrid Fc region comprising SEQ ID NO:133 (see Table 9 and FIG. 4). Other combinations of IgG1/IgG4 hinges, IgG4 CH2 domain, and IgG1 CH3 domains and exemplary IgG1/IgG4 hybrid Fcs created by such combinations are provided in Table 9. The aa sequences of the exemplary IgG1/IgG4 hybrid Fcs listed in Table 9 (SEQ ID NOs:133-166) are provided in FIG. 5. Compatible IgG1 Fcs in Table 9 are separated from other IgG1 Fcs by a blank row.

TABLE 9
Exemplary combinations of IgG1/IgG4 hinges, CH2 domain and CH3
domain forming exemplary IgG1/IgG4 hybrid Fcs

| Hinge | IgG4 CH2 | IgG1 CH3 | IgG1/IgG4 Fc |
|---|---|---|---|
| SEQ ID NO: 20 | SEQ ID NO: 26 | SEQ ID NO: 29 | SEQ ID NO: |
| | | | 133 |
| SEQ ID NO: 24 | SEQ ID NO: 26 | SEQ ID NO: 29 | SEQ ID NO: |
| | | | 134 |
| SEQ ID NO: 20 | SEQ ID NO: 26 | SEQ ID NO: 33 | SEQ ID NO: |
| | | | 135 |
| SEQ ID NO: 24 | SEQ ID NO: 26 | SEQ ID NO: 37 | SEQ ID NO: |
| | | | 136 |
| SEQ ID NO: 20 | SEQ ID NO: 26 | SEQ ID NO: 37 | SEQ ID NO: |
| | | | 137 |
| SEQ ID NO: 24 | SEQ ID NO: 26 | SEQ ID NO: 33 | SEQ ID NO: |
| | | | 138 |
| SEQ ID NO: 20 | SEQ ID NO: 26 | SEQ ID NO: 77 | SEQ ID NO: |
| | | | 139 |
| SEQ ID NO: 24 | SEQ ID NO: 26 | SEQ ID NO: 81 | SEQ ID NO: |
| | | | 140 |
| SEQ ID NO: 20 | SEQ ID NO: 26 | SEQ ID NO: 81 | SEQ ID NO: |
| | | | 141 |
| SEQ ID NO: 24 | SEQ ID NO: 26 | SEQ ID NO: 77 | SEQ ID NO: |
| | | | 142 |
| SEQ ID NO: 20 | SEQ ID NO: 26 | SEQ ID NO: 41 | SEQ ID NO: |
| | | | 143 |
| SEQ ID NO: 24 | SEQ ID NO: 26 | SEQ ID NO: 45 | SEQ ID NO: |
| | | | 144 |
| SEQ ID NO: 20 | SEQ ID NO: 26 | SEQ ID NO: 45 | SEQ ID NO: |
| | | | 145 |
| SEQ ID NO: 24 | SEQ ID NO: 26 | SEQ ID NO: 41 | SEQ ID NO: |
| | | | 146 |
| SEQ ID NO: 21 | SEQ ID NO: 26 | SEQ ID NO: 33 | SEQ ID NO: |
| | | | 147 |
| SEQ ID NO: 24 | SEQ ID NO: 26 | SEQ ID NO: 77 | SEQ ID NO: |
| | | | 148 |
| SEQ ID NO: 22 | SEQ ID NO: 26 | SEQ ID NO: 33 | SEQ ID NO: |
| | | | 149 |
| SEQ ID NO: 24 | SEQ ID NO: 26 | SEQ ID NO: 77 | SEQ ID NO: |
| | | | 150 |
| SEQ ID NO: 20 | SEQ ID NO: 26 | SEQ ID NO: 84 | SEQ ID NO: |
| | | | 151 |
| SEQ ID NO: 24 | SEQ ID NO: 26 | SEQ ID NO: 86 | SEQ ID NO: |
| | | | 152 |
| SEQ ID NO: 20 | SEQ ID NO: 26 | SEQ ID NO: 86 | SEQ ID NO: |
| | | | 153 |
| SEQ ID NO: 24 | SEQ ID NO: 26 | SEQ ID NO: 84 | SEQ ID NO: |
| | | | 154 |
| SEQ ID NO: 20 | SEQ ID NO: 26 | SEQ ID NO: 88 | SEQ ID NO: |
| | | | 155 |
| SEQ ID NO: 24 | SEQ ID NO: 26 | SEQ ID NO: 90 | SEQ ID NO: |
| | | | 156 |
| SEQ ID NO: 20 | SEQ ID NO: 26 | SEQ ID NO: 90 | SEQ ID NO: |
| | | | 157 |
| SEQ ID NO: 24 | SEQ ID NO: 26 | SEQ ID NO: 88 | SEQ ID NO: |
| | | | 158 |
| SEQ ID NO: 20 | SEQ ID NO: 26 | SEQ ID NO: 92 | SEQ ID NO: |
| | | | 159 |
| SEQ ID NO: 24 | SEQ ID NO: 26 | SEQ ID NO: 94 | SEQ ID NO: |
| | | | 160 |
| SEQ ID NO: 20 | SEQ ID NO: 26 | SEQ ID NO: 94 | SEQ ID NO: |
| | | | 161 |
| SEQ ID NO: 24 | SEQ ID NO: 26 | SEQ ID NO: 92 | SEQ ID NO: |
| | | | 162 |
| SEQ ID NO: 20 | SEQ ID NO: 26 | SEQ ID NO: 96 | SEQ ID NO: |
| | | | 163 |
| SEQ ID NO: 24 | SEQ ID NO: 26 | SEQ ID NO: 98 | SEQ ID NO: |
| | | | 164 |
| SEQ ID NO: 20 | SEQ ID NO: 26 | SEQ ID NO: 98 | SEQ ID NO: |
| | | | 165 |
| SEQ ID NO: 24 | SEQ ID NO: 26 | SEQ ID NO: 96 | SEQ ID NO: |
| | | | 166 |

[0538] Fc regions for use in TFcAs may also comprise aa sequences that differ from those described herein, e.g., SEQ ID NOs:99-166, in one or more aa modifications, e.g., aa deletions, additions or substitutions. In certain embodiments, an Fc region comprises an aa sequence that differs from a sequence set forth herein, e.g., from a sequence selected from the group consisting of SEQ ID NOs:99-166, in at most, 1, 2, 3, 4, 5, 6, 7, 8, 9, 10, 15, 20, 25, 30, 35, 40, 45 or 50 aas. In certain embodiments, an Fc region comprises an aa sequence that is at least 70%, 75%, 80%, 85%, 90%, 95%, 97%, 98% or 99% identical to that of a sequence set forth herein, e.g., a sequence selected from the group consisting of SEQ ID NOs:99-166. For example, the CH3 domain of an Fc region consisting of an aa sequence selected from the group consisting of SEQ ID NOs:99-166 may comprise a deletion of the C-terminal lysine and/or E356D and/or M358L. As several antibody effector functions, e.g., ADCC and CDC, are mediated through Fc regions, aa changes that can be made to Fc regions include changes affecting the effector function(s) of Fc regions. Exemplary mutations to these domains are set forth herein. Any of these aa modifications are permitted provided that the Fc region retains the desired properties, e.g., biological activity, stability and low immunogenicity.

### Exemplary Fc Modifications Affecting Effector Activity

[0539] TFcAs may comprise TFcs comprising aa modifications affecting the effector activity of Fc regions. Exemplary aa modifications are set forth below.

[0540] Replacements of aa residues in the Fc portion to alter antibody effector function are known in the art (see, e.g., U.S. Pat. Nos. 5,648,260 and 5,624,821). The Fc portion of an antibody mediates several important effector functions e.g., cytokine induction, antibody-dependent cellular cytotoxicity (“ADCC”), phagocytosis, complement dependent cytotoxicity (CDC) and half-life/clearance rate of antibody and antigen-antibody complexes. In some cases these effector functions are desirable for a therapeutic antibody but in other cases might be unnecessary or even deleterious, depending on the therapeutic objectives. Certain human IgG isotypes, particularly IgG1 and IgG3, mediate ADCC and CDC via binding to FcγRs and complement Clq, respectively. Neonatal Fc receptors (FcRn) are the critical components determining the circulating half-life of antibodies.

[0541] In one embodiment, a TFcA retains one or more of, and preferably all of the following attributes: ADCC and antibody-dependent cellular phagocytosis (ADCP) that in humans are determined by interactions with activating FcγRI, FcγRIIa/c, FcγRIIIa and inhibitory FcγRIIb receptors; CDC that is triggered by antibody binding to the components of the complement system; and long half-life that is mediated via active recycling by the neonatal Fc receptor (FcRn). When desired, all of these functions can be tuned to optimize the effectiveness of an anti-cancer therapy.

[0542] Certain aa modifications, e.g., the addition, deletion and/or substitution of one or more aas may be made to an immunoglobulin constant region to reduce or increase the natural biological activities of the constant domains, such as those set forth above.

[0543] In certain embodiments, a TFcA (e.g., a TFcBA) comprises an aa modification (e.g., an aa substitution, addition or deletion) in an Fc region that alters one or more antigen-independent effector functions of the domain, e.g., the circulating half-life of a protein comprising the domain. Exemplary antibodies exhibit either increased or decreased binding to FcRn when compared to antibodies lacking such aa changes and, therefore, have an increased or decreased half-life in serum, respectively. Antibodies comprising Fc variants with improved affinity for FcRn are anticipated to have longer serum half-lives, whereas those comprising Fc variants with decreased FcRn binding affinity are expected to have shorter half-lives. In one embodiment, a TFcA with altered FcRn binding comprises at least one Fc region having one or more aa changes within the “FcRn binding loop” of an Fc region. The FcRn binding loop is comprised of aa residues 280-299 (EU) of a wild type, full length, Fc. In certain embodiments, a TFcA having altered FcRn binding affinity comprises at least one Fc region having one or more aa substitutions within the 15 Å FcRn “contact zone.” The term 15 Å FcRn “contact zone” includes residues at the following positions of a wild type, full-length Fc domain: 243-261, 275-280, 282-293, 302-319, 336-348, 367, 369, 372-389, 391, 393, 408, 424-440 (EU). In certain embodiments, a TFcA having altered FcRn binding affinity comprises at least one Fc region (e.g., one or two Fc moieties) having one or more aa changes at an aa position corresponding to any one of the following EU positions: 256, 277-281, 283-288, 303-309, 313, 338, 342, 376, 381, 384, 385, 387, 434 (e.g., N434A or N434K), and 438. Exemplary aa changes that alter FcRn binding activity are disclosed in International PCT Publication No. WO05/047327.

[0544] Additional Fc modifications that enhance FcRn binding include substitutions at positions 259, 308, 428, and 434, e.g., 259I, 308F, 428L, 428M, 434S, 434H, 434F, 434Y, 434M, 428L/434S, 259I/308F and 259I/308F/428L. Other variants that increase Fc binding to FcRn include: 250E, 250Q, 428L, 428F, 250Q/428L (Hinton et al., 2004, J. Biol. Chem. 279(8): 6213-6216, Hinton et al. 2006 Journal of Immunology 176:346-356), 256A, 272A, 286A, 305A, 307A, 307Q, 311A, 312A, 376A, 378Q, 380A, 382A, 434A (Shields et al, Journal of Biological Chemistry, 2001, 276(9):6591-6604), 252F, 252T, 252Y, 252W, 254T, 256S, 256R, 256Q, 256E, 256D, 256T, 309P, 311S, 433R, 433S, 433I, 433P, 433Q, 434H, 434F, 434Y, 252Y/254T/256E, 433K/434F/436H, 308T/309P/311S (Dall Acqua et al. Journal of Immunology, 2002, 169:5171-5180, Dall'Acqua et al., 2006, Journal of Biological Chemistry 281:23514-23524). Other modifications for modulating FcRn binding are described in Yeung et al., 2010, J Immunol, 182:7663-7671.

[0545] In some embodiments, a TFcA comprises an Fc variant comprising an aa change that alters the antigen-dependent effector functions of the polypeptide, in particular ADCC or complement activation, e.g., as compared to a wild type Fc region. In exemplary embodiment, said antibodies exhibit altered binding to an Fc gamma receptor (e.g., CD16). Such antibodies exhibit either increased or decreased binding to FcγRs when compared to wild type polypeptides and, therefore, mediate enhanced or reduced effector function, respectively. Fc variants with improved affinity for FcγRs are anticipated to enhance effector function, and such proteins may have useful applications in methods of treating mammals where target molecule destruction is desired, e.g., in tumor therapy. In contrast, Fc variants with decreased FcγR binding affinity are expected to reduce effector function. In one embodiment, a TFcA comprises at least one altered antigen-dependent effector function selected from the group consisting of opsonization, phagocytosis, complement dependent cytotoxicity, antigen-dependent cellular cytotoxicity (ADCC), or effector cell modulation as compared to a TFcA comprising a wild type Fc region.

[0546] In certain embodiments, a TFcA exhibits altered binding to an activating FcγR (e.g. FcγRI, FcγRIIa, or FcγRIIIa). In certain embodiments, a TFcA exhibits altered binding affinity to an inhibitory FcγR (e.g. FcγRIIb). In other embodiments, a TFcA having increased FcγR binding affinity (e.g. increased FcγRIIIa binding affinity) comprises at least one Fc domain having an aa change at an aa position corresponding to one or more of the following positions: 239, 268, 298, 332, 334, and 378 (EU). In certain embodiments, a TFcA having decreased FcγR binding affinity (e.g. decreased FcγRI, FcγRII, or FcγRIIIa binding affinity) comprises at least one Fc domain having an aa substitution at an aa position corresponding to one or more of the following positions: 234, 236, 239, 241, 251, 252, 261, 265, 268, 293, 294, 296, 298, 299, 301, 326, 328, 332, 334, 338, 376, 378, and 435 (EU).

[0547] In certain embodiments, a TFcA having increased complement binding affinity (e.g. increased Clq binding affinity) comprises an Fc domain having an aa change at an aa position corresponding to one or more of the following positions: 251, 334, 378, and 435 (EU). In certain embodiments, a TFcA having decreased complement binding affinity (e.g. decreased Clq binding affinity) comprises an Fc domain having an aa substitution at an aa position corresponding to one or more of the following positions: 239, 294, 296, 301, 328, 333, and 376 (EU). Exemplary aa changes that alter FcγR or complement binding activity are disclosed in International PCT Publication No. WO05/063815. In certain embodiments, a TFcA may comprise one or more of the following specific Fc region substitutions: S239D, S239E, M252T, H268D, H268E, I332D, I332E, N434A, and N434K (EU).

[0548] Other Fc variants that reduce binding to FcγRs and/or complement include variants comprising one or more of the following aa substitutions: 34G, 235G, 236R, 237K, 267R, 269R, 325L, 328R, 236R/328R, 297A, 234A, 235A, 237A, 318A, 228P, 236E, 268Q, 309L, 330S, 331 S, 220S, 226S, 229S, 238S, 233P, and 234V. Removal of the glycosylation at position 297 (see below) also reduces binding to FcγRs.

[0549] Fc modifications that improve binding to FcγRs and/or complement include variants comprising one or more of the following aa substitutions: 236A, 239D, 239E, 268D, 267E, 268E, 268F, 324T, 332D, and 332E. Preferred variants include but are not limited to 239D/332E, 236A/332E, 236A/239D/332E, 268F/324T, 267E/268F, 267E/324T, and 267E/268F/324T. Other modifications for enhancing FcγR and complement interactions include but are not limited to substitutions 298A, 333A, 334A, 326A, 247I, 339D, 339Q, 280H, 290S, 298D, 298V, 243L, 292P, 300L, 396L, 305I, and 396L.

[0550] Variants that improve binding to FcγRIIb include variants comprising one or more of the following aa substitutions: 234D, 234E, 234W, 235D, 235F, 235R, 235Y, 236D, 236N, 237D, 237N, 239D, 239E, 266M, 267D, 267E, 268D, 268E, 327D, 327E, 328F, 328W, 328Y and 332E, 235Y/267E, 236D/267E, 239D/268D, 239D/267E, 267E/268D, 267E/268E, and 267E/328F.

[0551] Fc modifications modulating Fc are described in Strohl, 2009, Current Opinion in Biotechnology 20:685-691.

[0552] A TFcA may also comprise an aa substitution that alters the glycosylation of the TFcA. For example, an immunoglobulin constant region of a TFcA may comprise an Fc domain having a mutation leading to reduced glycosylation (e.g., N- or O-linked glycosylation) or may comprise an altered glycoform of the wild type Fc domain (e.g., a low fucose or fucose-free glycan). An “engineered glycoform” refers to a carbohydrate composition that is covalently attached to an Fc region, wherein said carbohydrate composition differs chemically from that of a parent Fc region. Engineered glycoforms may be useful for a variety of purposes, including but not limited to enhancing or reducing effector function. Engineered glycoforms may be generated by a variety of methods known in the art (U.S. Pat. No. 6,602,684; US Pat Pub No. 2010-0255013; US Pat Pub No. 2003-0003097; WO 00/61739A1; WO 01/29246A1; WO 02/31140A1; WO 02/30954A1); (Potelligent technology (Biowa, Inc., Princeton, N.J.); and GlycoMAb glycosylation engineering technology (Glycart Biotechnology AG, Zurich, Switzerland). Many of these techniques are based on controlling the level of fucosylated and/or bisecting oligosaccharides that are covalently attached to the Fc region, for example by expressing an Fc polypeptide in various organisms or cell lines, engineered or otherwise (for example Lec-13 CHO cells or rat hybridoma YB2/0 cells), by regulating enzymes involved in the glycosylation pathway (for example FUT8 [al, 6-fucosyltranserase] and/or (31-4-N-acetylglucosaminyl, transferase III [GnTIII]), or by modifying carbohydrate(s) after the Fc polypeptide has been expressed.

[0553] In exemplary embodiments, an aa change, e.g., an aa substitution, results in an Fc region comprising reduced glycosylation of the N-linked glycan normally found at aa position 297 (EU). The Fc region may also comprise a low fucose or fucose free glycan at aa position 297 (EU). In certain embodiments, the TFcA has an aa substitution near or within a glycosylation motif, for example, an N-linked glycosylation motif that contains the aa sequence NXT or NXS. In a particular embodiment, a TFcA comprises an aa substitution at an aa position corresponding to 297 or 299 of Fc (EU) as further described herein. Exemplary aa substitutions that reduce or alter glycosylation are disclosed in International PCT Publication No. WO05/018572 and US Pat Pub No. 2007/0111281.

[0554] In other embodiments, a TFcA comprises at least one Fc domain having one or more engineered cysteine residues or analog thereof that are located at the solvent-exposed surface. Preferably the engineered cysteine residue or analog thereof does not interfere with the desired biological activity of the TFcA. For example, it may be desirable that the alteration does not interfere with the ability of the Fc to bind to Fc receptors (e.g. FcγRI, FcγRII, or FcγRIII) or complement proteins (e.g. Clq), or to trigger immune effector function (e.g., antibody-dependent cytotoxicity (ADCC), phagocytosis, or CDC). In certain embodiments, TFcAs comprise an Fc domain comprising at least one engineered free cysteine residue or analog thereof that is substantially free of disulfide bonding with a second cysteine residue. TFcAs may comprise an Fc region having engineered cysteine residues or analogs thereof at one or more of the following positions in the CH3 domain: 349-371, 390, 392, 394-423, 441-446, and 446b (EU), and more specifically positions 350, 355, 359, 360, 361, 389, 413, 415, 418, 422, 441, 443, and EU position 446b.

[0555] Desired effector functions may also be obtained by choosing an Fc from a particular immunoglobulin class or subclass, or by combining particular regions from particular immoglobulin classes or subclasses, e.g., IgG1, IgG2, etc. For example, since ADCC and CDC (through binding of IgG to the FcγRs and Clq, respectively) is mediated by residues located in the hinge and CH2 domain, and since IgG4 essentially lacks effector functions, an Fc constructed by combining the hinge and CH2 domain of IgG4 and the CH3 domain of IgG1 has much reduced effector functions. An IgG1/IgG3 hybrid variant may be constructed by substituting IgG1 positions in the CH2 and/or CH3 region with the amino acids from IgG3 at positions where the two isotypes differ. Thus a hybrid variant IgG antibody may be constructed that comprises one or more of the following substitutions: 274Q, 276K, 300F, 339T, 356E, 358M, 384S, 392N, 397M, 422I, 435R, and 436F. In certain embodiments, an IgG1/IgG2 hybrid variant may be constructed by substituting IgG2 positions in the CH2 and/or CH3 region with amino acids from IgG1 at positions where the two isotypes differ. Thus a hybrid variant IgG antibody may be constructed that comprises one or more of the following amino acid substations: 233E, 234L, 235L, -236G (referring to an insertion of a glycine at position 236), and 327A.

### Exemplary TFc Linkers

[0556] A TFcA may comprise a TFc comprising a first Fc region that is linked to a second Fc region through a TFc linker A wide variety of linkers may be used provided that they are sufficiently flexible to allow proper folding of the TFc and of a TFcA comprising the TFc. In certain embodiments, a linker is biologically inert, e.g., mostly incapable of inducing a biological response, e.g., an immune response.

[0557] A TFc linker may be 1-10, 10-20, 20-30, 30-40, 40-50, 50-60, 60-70, 70-80, 80-90 or at least 90-100 aas long. The size of a TFc linker may depend on whether the second Fc region comprises a hinge, a portion thereof or no hinge at all. For example, when the second Fc region comprises a hinge, a shorter TFc linker may be used than when the second Fc region does not comprise a hinge. For example, when a second Fc region does not comprise a hinge, a TFc linker may be longer by a number of aas corresponding to the length of a hinge. When a second Fc region does not comprise an upper hinge, a TFc linker may be longer by a number of aas corresponding to the length of the upper hinge. In a preferred embodiment, a TFcA, e.g., a TFcA that comprises a second hinge consisting of a middle and lower hinge, comprises a TFc linker comprising from 35 to 45 aas, such as from 37 to 43 aas, such as from 38 to 42 aas, such as from 39 to 41 aas, and more particularly, 40 aas.

[0558] A TFc linker may comprise a Gly-Ser linker A “Gly-Ser linker” refers to a peptide that consists of glycine and serine residues. An exemplary Gly-Ser linker comprises an aa sequence having the formula (Gly₄Ser)ₙ (SEQ ID NO: 493), wherein n is a positive integer (e.g., 1, 2, 3, 4, 5, 6, 7, 8, 9, 10, 11, 12, 13, 14, 15, 16, 17, 18, 19, 20). For example, in certain embodiments, a TFc linker comprises or consists of (Gly₄Ser)₃ (SEQ ID NO: 495) or (Gly₄Ser)₄ (SEQ ID NO: 496) or (Gly₄Ser)₅ (SEQ ID NO: 497) or (Gly₄Ser)₆ (SEQ ID NO: 498) or (Gly₄Ser)₇ (SEQ ID NO: 499) or (Gly₄Ser)₈ (SEQ ID NO: 491). In a preferred embodiment, the TFc linker is (Gly₄Ser)₈ (SEQ ID NO: 491.

[0559] Other linkers that may be used include those that comprise Gly and Ser, but not in a (G4S)ₙ structure. For example, linkers may comprise (Gly-Gly-Ser)ₙ or (Gly-Ser-Gly-Ser)ₙ, wherein n is 1, 2, 3, 4, 5, 6, 7, 8, 9, 10, 11, 12, 13, 14, 15 or more. Other linkers may comprise Pro or Thr. Suitable linkers may be found in the Registry of Standard Biological Parts at http://partsregistry.org/Protein_domains/Linker (see also, e.g., Crasto C J and Feng J A. LINKER: a program to generate linker sequences for fusion proteins. Protein Eng 2000 May; 13(5) 309-12 and George R A and Hering a J. An analysis of protein domain linkers: their classification and role in protein folding. Protein Eng 2002 November; 15(11) 871-9).

[0560] In certain embodiments, a TFc linker comprises the following aa sequence:

(SEQ ID NO: 169)
TRPAPPSTATTAGSTPQPESASPSGKEPAASSPSSTNTGS

[0561] TFc linkers comprising an aa sequence that differs from SEQ ID NO:169 or from a (G4S)ₙ (SEQ ID NO: 492) sequence in at most 1, 2, 3, 4, 5, 6, 7, 8, 9 or 10 aas may also be used.

[0562] A TFc linker may also be a non-peptide linker, such as a non-peptide polymer. The term “non-peptide polymer,” refers to a biocompatible polymer including two or more repeating units linked to each other by a covalent bond excluding the peptide bond. Examples of the non-peptide polymer include poly (ethylene glycol), poly (propylene glycol), copolymers of ethylene glycol and propylene glycol, polyoxyethylated polyols, polyvinyl alcohol, polysaccharides, dextran, polyvinyl ether, biodegradable polymers such as PLA (poly (lactic acid) and PLGA (poly (lactic-glycolic acid), lipid polymers, chitins, and hyaluronic acid. The most preferred is poly (ethylene glycol) (PEG).

### Exemplary TFcs

[0563] TFcAs may comprise a TFc comprising a first Fc region that is linked to a second Fc region through a TFc linker. In certain embodiments, a TFc comprises a first and a second Fc region that are identical to each other. In other embodiments, the first and the second Fc regions differ from each other in at least one aa (“heteromeric TFc”). A first and a second Fc region may be any Fc region disclosed herein or a variation thereof. For example, a TFc may comprise a first Fc region that comprises a full length hinge, e.g., a full length IgG1 or IgG1/IgG4 hybrid hinge, and a second Fc region that comprises a partial hinge, e.g., a hinge that is devoid of the upper hinge.

[0564] First and second Fc regions may be combined with any TFc linker described herein. As set forth above, generally the length of the TFc linker may depend on whether the second Fc region comprises a hinge, a portion thereof, or no hinge at all.

[0565] In certain embodiments, an IgG1 TFc comprises a first Fc region comprising SEQ ID NO:99 and a second Fc region comprising SEQ ID NO:100. Combinations of first and second Fc regions that may be used in IgG1 TFcs are set forth in Table 10.

TABLE 10
Exemplary combinations of first and second Fc regions (shown in FIG. 4)
for use in IgG1 TFcs

| First Fc region | Second Fc region |
|---|---|
| SEQ ID NO: 99 | SEQ ID NO: 100 |
| SEQ ID NO: 101 | SEQ ID NO: 102 |
| SEQ ID NO: 103 | SEQ ID NO: 104 |
| SEQ ID NO: 105 | SEQ ID NO: 106 |
| SEQ ID NO: 107 | SEQ ID NO: 108 |
| SEQ ID NO: 109 | SEQ ID NO: 110 |
| SEQ ID NO: 111 | SEQ ID NO: 112 |
| SEQ ID NO: 113 | SEQ ID NO: 114 |
| SEQ ID NO: 115 | SEQ ID NO: 116 |
| SEQ ID NO: 117 | SEQ ID NO: 118 |
| SEQ ID NO: 119 | SEQ ID NO: 120 |
| SEQ ID NO: 121 | SEQ ID NO: 122 |
| SEQ ID NO: 123 | SEQ ID NO: 124 |
| SEQ ID NO: 125 | SEQ ID NO: 126 |
| SEQ ID NO: 127 | SEQ ID NO: 128 |
| SEQ ID NO: 129 | SEQ ID NO: 130 |
| SEQ ID NO: 131 | SEQ ID NO: 132 |

[0566] In certain embodiments, an IgG1/IgG4 hybrid TFc comprises a first Fc region comprising SEQ ID NO:133 and a second Fc region comprising SEQ ID NO:134. Combinations of first and second Fc regions that may be used in IgG1/IgG4 hybrid TFcs are set forth in Table 11.

TABLE 11
Exemplary combinations of first and second Fc regions (shown in FIG. 5)
for use in IgG1/IgG4 TFcs

| First Fc region | Second Fc region |
|---|---|
| SEQ ID NO: 133 | SEQ ID NO: 134 |
| SEQ ID NO: 135 | SEQ ID NO: 136 |
| SEQ ID NO: 137 | SEQ ID NO: 138 |
| SEQ ID NO: 139 | SEQ ID NO: 140 |
| SEQ ID NO: 141 | SEQ ID NO: 142 |
| SEQ ID NO: 143 | SEQ ID NO: 144 |
| SEQ ID NO: 145 | SEQ ID NO: 146 |
| SEQ ID NO: 147 | SEQ ID NO: 148 |
| SEQ ID NO: 149 | SEQ ID NO: 150 |
| SEQ ID NO: 151 | SEQ ID NO: 152 |
| SEQ ID NO: 153 | SEQ ID NO: 154 |
| SEQ ID NO: 155 | SEQ ID NO: 156 |
| SEQ ID NO: 157 | SEQ ID NO: 158 |
| SEQ ID NO: 159 | SEQ ID NO: 160 |
| SEQ ID NO: 161 | SEQ ID NO: 162 |
| SEQ ID NO: 163 | SEQ ID NO: 164 |
| SEQ ID NO: 165 | SEQ ID NO: 166 |

[0567] A TFc may comprise a combination of two Fcs set forth in Table 10 or 11, which are linked together through a TFc linker to form a contiguous polypeptide comprising in amino to carboxyl terminal order: a first Fc region, which is linked at its C-terminus to the N-terminus of a TFc linker, which is linked at its C-terminus to the N-terminus of the second Fc region. The TFc linker may comprise or consist of 20 to 50 amino acids in length.

[0568] Exemplary TFcs may comprise: i) a first Fc region comprising a hinge comprising SEQ ID NO:4, a CH2 domain comprising SEQ ID NO:25, a CH3 domain comprising SEQ ID NO:33; ii) a TFc linker comprising (G₄S)₈ (SEQ ID NO: 491); and iii) a second Fc region comprising a hinge comprising SEQ ID NO:23, a CH2 domain comprising SEQ ID NO:25 and a CH3 domain comprising SEQ ID NO:37. An exemplary IgG1 TFc comprising this set of elements is a TFc comprising SEQ ID NO:171. Additional combinations of domains or elements forming IgG1 and IgG1/IgG4 hybrid TFcs are provided in Table 12 and 13, respectively. Each of the elements or domains in Tables 12 and 13 is referred to by its SEQ ID NO and the specific AEM and/or DiS that it comprises. Each of the domains or elements in Tables 12 and 13 may be linked directly or indirectly.

[0569] The aa sequence of each of the TFcs listed in Table 12 (SEQ ID NOs:171, 173, 175, 177, 179, 181, 183, 185, 187, 189, 191, 193 and 195) is provided in FIG. 6. The aa sequence of each of the TFcs listed in Table 13 (SEQ ID NOs:197, 199, 201, 203, 205, 207, 209, 211, 213, 215, 217, 219 and 221) is provided in FIG. 7. The first column of Tables 12 and 13 lists the name and SEQ ID NO of an exemplary TFc comprising the elements listed in the corresponding row of the Table.

TABLE 12
IgG1 TFcs set forth in FIG. 6 (“(G₄S)₈,” “(G₄S)₄,” “(G₄S)₇,” “(G₄S)₆,” and “(G₄S)₅”
disclosed as SEQ ID NOS 491, 496, 499, 498 and 497, respectively)
IgG1 TFc

| | First Fc | | | TFc | Second Fc | | |
|---|---|---|---|---|---|---|---|
| | Hinge | CH2 | CH3 | linker | Hinge | CH2 | CH3 |
| 23 | SEQ ID | SEQ ID | SEQ ID NO: 33 | (G₄S)₈ | SEQ ID | SEQ ID | SEQ ID NO: 37 |
| SEQ ID | NO: 4 | NO: 25 | T366S/L368A/ | | NO: 23 | NO: 25 | T366W |
| NO: 171 | wild type | | Y407V | | partial | | |
| 23A | SEQ ID | SEQ ID | SEQ ID NO: 77 | (G₄S)₈ | SEQ ID | SEQ ID | SEQ ID NO: 81 |
| SEQ ID | NO: 4 | NO: 25 | Y349C/T366S/ | | NO: 23 | NO: 25 | S354C/T366W |
| NO: 173 | wild type | | L368A/Y407V | | partial | | |
| 23B | SEQ ID | SEQ ID | SEQ ID NO: 41 | (G₄S)₈ | SEQ ID | SEQ ID | SEQ ID NO: 45 |
| SEQ ID | NO: 4 | NO: 25 | Y407T | | NO: 23 | NO: 25 | T366Y |
| NO: 175 | wild type | | | | partial | | |
| 23C | SEQ ID | SEQ ID | SEQ ID NO: 33 | (G₄S)₈ | SEQ ID | SEQ ID | SEQ ID NO: 37 |
| SEQ ID | NO: 18 | NO: 25 | T366S/L368A/ | | NO: 23 | NO: 25 | T366W |
| NO: 177 | H224C/ | | Y407V | | partial | | |
| | T225C | | | | | | |
| 23D | SEQ ID | SEQ ID | SEQ ID NO: 33 | (G₄S)₈ | SEQ ID | SEQ ID | SEQ ID NO: 37 |
| SEQ ID | NO: 19 | NO: 25 | T366S/L368A/ | | NO: 23 | NO: 25 | T366W |
| NO: 179 | T223C | | Y407V | | partial | | |
| 23E | SEQ ID | SEQ ID | SEQ ID NO: 84 | (G₄S)₈ | SEQ ID | SEQ ID | SEQ ID NO: 86 |
| SEQ ID | NO: 4 | NO: 25 | T366S/L368A/ | | NO: 23 | NO: 25 | T366W/C-term |
| NO: 181 | wild type | | Y407V/C-term | | partial | | Cysteine |
| | | | Cysteine | | | | |
| 23G | SEQ ID | SEQ ID | SEQ ID NO: 33 | (G₄S)₄ | SEQ ID | SEQ ID | SEQ ID NO: 37 |
| SEQ ID | NO: 4 | NO: 25 | T366S/L368A/ | | NO: 23 | NO: 25 | T366W |
| NO: 183 | wild type | | Y407V | | partial | | |
| 23E | SEQ ID | SEQ ID | SEQ ID NO: 84 | (G₄S)₇ | SEQ ID | SEQ ID | SEQ ID NO: 86 |
| (35L) | NO: 4 | NO: 25 | T366S/L368A/ | | NO: 23 | NO: 25 | T366W/C-term |
| SEQ ID | wild type | | Y407V/C-term | | partial | | Cysteine |
| NO: 185 | | | Cysteine | | | | |
| 23E | SEQ ID | SEQ ID | SEQ ID NO: 88 | (G₄S)₇ | SEQ ID | SEQ ID | SEQ ID NO: 90 |
| (35L) Inv | NO: 4 | NO: 25 | T366S/L368A/ | | NO: 23 | NO: 25 | T366W/C-term |
| SEQ ID | wild type | | Y407V/C-term | | partial | | Cysteine Inv |
| NO: 187 | | | Cysteine Inv | | | | |
| 23E | SEQ ID | SEQ ID | SEQ ID NO: 84 | (G₄S)₆ | SEQ ID | SEQ ID | SEQ ID NO: 86 |
| (30L) | NO: 4 | NO: 25 | T366S/L368A/ | | NO: 23 | NO: 25 | T366W/C-term |
| SEQ ID | wild type | | Y407V/C-term | | partial | | Cysteine |
| NO: 189 | | | Cysteine | | | | |
| 23E | SEQ ID | SEQ ID | SEQ ID NO: 84 | (G₄S)₅ | SEQID | SEQ ID | SEQ ID NO: 86 |
| (25L) | NO: 4 | NO: 25 | T366S/L368A/ | | NO: 23 | NO: 25 | T366W/C-term |
| SEQ ID | wild type | | Y407V/C-term | | partial | | Cysteine |
| NO: 191 | | | Cysteine | | | | |
| 23I | SEQ ID | SEQ ID | SEQ ID NO: 92 | (G₄S)₈ | SEQ ID | SEQ ID | SEQ ID NO: 94 |
| SEQ ID | NO: 4 | NO: 25 | S364H/F405A | | NO: 23 | NO: 25 | Y349T/T394F |
| NO: 193 | wild type | | | | partial | | |
| 23J | SEQ ID | SEQ ID | SEQ ID NO: 96 | (G₄S)₈ | SEQ ID | SEQ ID | SEQ ID NO: 98 |
| SEQ ID | NO: 4 | NO: 25 | K370D/K392D/ | | NO: 23 | NO: 25 | D356K/E357K/D |
| NO: 195 | wild type | | K409D | | partial | | 399K |

TABLE 13
IgG1/IgG4 hybrid TFcs set forth in FIG. 7 (“(G₄S)₈,” “(G₄S)₄,” “(G₄S)₇,” “(G₄S)₆” and “(G₄S)₅”
disclosed as SEQ ID NOS 491, 496, 499, 498 and 497, respectively)
IgG1/IgG4 hybrid TFc

| | First Fc | | | TFc | Second Fc | | |
|---|---|---|---|---|---|---|---|
| | Hinge | CH2 | CH3 | linker | Hinge | CH2 | CH3 |
| 39 | SEQ ID | SEQ ID | SEQ ID NO: 33 | (G₄S)₈ | SEQ ID | SEQ ID | SEQ ID NO: 37 |
| SEQ ID | NO: 20 | NO: 26 | T366S/L368A/ | | NO: 24 | NO: 26 | T366W |
| NO: 197 | wild type | | Y407V | | partial | | |
| 39A | SEQ ID | SEQ ID | SEQ ID NO: 77 | (G₄S)₈ | SEQ ID | SEQ ID | SEQ ID NO: 81 |
| SEQ ID | NO: 20 | NO: 26 | Y349C/T366S/ | | NO: 24 | NO: 26 | S354C/T366W |
| NO: 199 | wild type | | L368A/Y407V | | partial | | |
| 39B | SEQ ID | SEQ ID | SEQ ID NO: 41 | (G₄S)₈ | SEQ ID | SEQ ID | SEQ ID NO: 45 |
| SEQ ID | NO: 20 | NO: 26 | Y407T | | NO: 24 | NO: 26 | T366Y |
| NO: 201 | wild type | | | | partial | | |
| 39C | SEQ ID | SEQ ID | SEQ ID NO: 33 | (G₄S)₈ | SEQ ID | SEQ ID | SEQ ID NO: 37 |
| SEQ ID | NO: 21 | NO: 26 | T366S/L368A/ | | NO: 24 | NO: 26 | T366W |
| NO: 203 | H224C/ | | Y407V | | partial | | |
| | T225C | | | | | | |
| 23D | SEQ ID | SEQ ID | SEQ ID NO: 33 | (G₄S)₈ | SEQ ID | SEQ ID | SEQ ID NO: 37 |
| SEQ ID | NO: 22 | NO: 26 | T366S/L368A/ | | NO: 24 | NO: 26 | T366W |
| NO: 205 | T223C | | Y407V | | partial | | |
| 39E | SEQ ID | SEQ ID | SEQ ID NO: 84 | (G₄S)₈ | SEQ ID | SEQ ID | SEQ ID NO: 86 |
| SEQ ID | NO: 20 | NO: 26 | T366S/L368A/ | | NO: 24 | NO: 26 | T366W/C-term |
| NO: 207 | wild type | | Y407V/C-term | | partial | | Cysteine |
| | | | Cysteine | | | | |
| 39G | SEQ ID | SEQ ID | SEQ ID NO: 33 | (G₄S)₄ | SEQ ID | SEQ ID | SEQ ID NO: 37 |
| SEQ ID | NO: 20 | NO: 26 | T366S/L368A/ | | NO: 24 | NO: 26 | T366W |
| NO: 209 | wild type | | Y407V | | partial | | |
| 39E | SEQ ID | SEQ ID | SEQ ID NO: 84 | (G₄S)₇ | SEQ ID | SEQ ID | SEQ ID NO: 86 |
| (35L) | NO: 20 | NO: 26 | T366S/L368A/ | | NO: 24 | NO: 26 | T366W/C-term |
| SEQ ID | wild type | | Y407V/C-term | | partial | | Cysteine |
| NO: 211 | | | Cysteine | | | | |
| 39E | SEQ ID | SEQ ID | SEQ ID NO: 88 | (G₄S)₇ | SEQ ID | SEQ ID | SEQ ID NO: 90 |
| (35L) Inv | NO: 20 | NO: 26 | T366S/L368A/ | | NO: 24 | NO: 26 | T366W/C-term |
| SEQ ID | wild type | | Y407V/C-term | | partial | | Cysteine Inv |
| NO: 213 | | | Cysteine Inv | | | | |
| 39E | SEQ ID | SEQ ID | SEQ ID NO: 84 | (G₄S)₆ | SEQ ID | SEQ ID | SEQ ID NO: 86 |
| (30L) | NO: 20 | NO: 26 | T366S/L368A/ | | NO: 24 | NO: 26 | T366W/C-term |
| SEQ ID | wild type | | Y407V/C-term | | partial | | Cysteine |
| NO: 215 | | | Cysteine | | | | |
| 39E | SEQ ID | SEQ ID | SEQ ID NO: 84 | (G₄S)₅ | SEQ ID | SEQ ID | SEQ ID NO: 86 |
| (25L) | NO: 20 | NO: 26 | T366S/L368A/ | | NO: 24 | NO: 26 | T366W/C-term |
| SEQ ID | wild type | | Y407V/C-term | | partial | | Cysteine |
| NO: 217 | | | Cysteine | | | | |
| 39I | SEQ ID | SEQ ID | SEQ ID NO: 92 | (G₄S)₈ | SEQ ID | SEQ ID | SEQ ID NO: 94 |
| SEQ ID | NO: 20 | NO: 26 | S364H/F405A | | NO: 24 | NO: 26 | Y349T/T394F |
| NO: 219 | wild type | | | | partial | | |
| 39J | SEQ ID | SEQ ID | SEQ ID NO: 96 | (G₄S)₈ | SEQ ID | SEQ ID | SEQ ID NO: 98 |
| SEQ ID | NO: 20 | NO: 26 | K370D/K392D/ | | NO: 24 | NO: 26 | D356K/E357K/D |
| NO: 221 | wild type | | K409D | | partial | | 399K |

[0570] In certain embodiments, a TFc comprises an aa sequence that differs from that of a TFc described herein, e.g., an aa sequence selected from the group consisting of SEQ ID NOs:171, 173, 175, 177, 179, 181, 183, 185, 187, 189, 191, 193, 195, 197, 199, 201, 203, 205, 207, 209, 211, 213, 215, 217, 219 and 221, in at most 10, 20, 30, 40, 50, 60, 70, 80, 90, 100, 150, 200, 250 or 300 aas, provided that the TFc has the desired biological activity, such as effector function or lack thereof, proper folding, sufficient stability and solubility. Differences may be one or more aa insertions, deletions and/or substitutions. In certain embodiments, a TFc comprises an aa sequence that is at least about 70%, 75%, 80%, 85%, 90%, 95%, 97%, 98%, or 99% identical to that of a TFc described herein, e.g., an aa sequence selected from the group consisting of SEQ ID NOs:171, 173, 175, 177, 179, 181, 183, 185, 187, 189, 191, 193, 195, 197, 199, 201, 203, 205, 207, 209, 211, 213, 215, 217, 219 and 221, provided that the TFcA comprising the TFc has the desired biological activity, such as effector function or lack thereof, proper folding, sufficient stability and/or sufficient solubility.

### Exemplary Binding Sites

[0571] A TFcA may be a monovalent TFcA that comprises a single binding site. The single binding site may be located a the amino terminus or carboxyl terminus of the TFc. The single binding site may be a Fab or an scFv. When the single binding site is a Fab, the monovalent TFcA comprises a heavy chain comprising the VH domain and optionally a CH1 domain and a light chain comprising the VL domain and optionally a CL domain.

[0572] A TFcA may also be a TFcBA comprising two binding sites, e.g., wherein each binding site binds to the same or to a different epitope or antigen (a bivalent monospecific of bispecific TFcA). The binding sites of a TFcBA may be of the same type or of a different type. For example, both binding sites may be TFcs, both binding sites may be Fabs, one binding site may be a Fab and the other binding site may be an scFv. Single domain binding sites may also be used. A Fab will generally comprise a VH domain, which may be linked to a CH1 domain on the heavy chain of a TFcBA and a VL domain, which may be linked to a CL domain on the light chain of the molecule. An scFv will generally comprise a VH domain linked to an scFv linker that is linked to a VL domain.

[0573] An scFv may be connected to a TFc by a connecting linker A connecting linker may be about 1-5, 1-10, 1-15, 1-20 aas long or longer. A connecting linker is preferably chemically inert, non immunogenic and has the required flexibility and rigidity for allowing the proper conformation of a TFcBA comprising the scFv. In one embodiment, a connecting linker comprises a Gly-Ser sequence, e.g., the aa sequence (G₄S)ₙ (SEQ ID NO: 502), wherein n is 1, 2, 3, 4, or 5 or more. In one embodiment, a connecting linker comprises (G₄S)₂ (SEQ ID NO: 494) (see, e.g., FIG. 9).

[0574] An scFv comprises an scFv linker that links together the VH and the VL domains. An scFv linker may be 15-30 or 20-25 aa long. An scFv linker is preferably chemically inert, non immunogenic and has the required flexibility and rigidity for allowing the proper conformation of a TFcBA comprising the scFv. In one embodiment, an scFv linker comprises a Gly-Ser sequence, e.g., the aa sequence (G₄S)ₙ (SEQ ID NO: 502), wherein n is 1, 2, 3, 4, or 5 or more. However, other sequences may also be used. In certain embodiments, an scFv linker may comprise a portion of a hinge or a full length hinge alone or together with other aas, such as a (G₄S)ₙ (SEQ ID NO: 492) sequence. In certain embodiments, an scFv linker comprises the sequence “AST” (the first 3 aa of a CH1 domain) upstream of a peptide linker, such as a Gly-Ser linker, e.g., (G₄S)₄ (SEQ ID NO: 496) (see, e.g., FIG. 9).

[0575] In certain embodiments, a TFcA does not comprise a first and/or a second hinge. Instead of a hinge, a TFcA may comprise a connecting linker. Such a linker may be a Gly-Ser linker as further described herein in the context of TFc linkers. An exemplary connecting linker may be shorter than a TFc linker. In certain embodiments, a connecting linker comprises a (G₄S)₃ (SEQ ID NO: 495) or (G₄S)₄ (SEQ ID NO: 496) sequence. In certain embodiments, a connecting linker comprises a portion of a hinge, e.g., an upper hinge, middle hinge, lower hinge, or a combination thereof or a portion of one of these and another peptide sequence, such as a (G₄S)ₙ (SEQ ID NO: 502) sequence, wherein n is 1, 2, 3, 4 or 5. Other peptide sequences may also be used as a connecting linker provided that they provide the required flexibility and rigidity of certain parts of the linker

[0576] In certain embodiments, a binding site is an antigen binding site, such as a Fab, scFv or single domain. Exemplary TFcAs comprise one or more VH and/or VL CDRs such as those from one or more of the variable regions provided herein. In certain embodiments, an anti-c-Met binding site comprises a VHCDR3 and/or a VLCDR3 sequence set forth in FIG. 9, such as those of the variable domains of the humanized antibody 5D5 (US2006/0134104) or the anti-c-Met binding site 2 (see Example 3). In certain embodiments, an anti-c-Met binding site comprises 1, 2 or 3 CDRs of one of the VH domains set forth in FIG. 9 and/or 1, 2 or 3 CDRs of the VL domain set forth in FIG. 9. In certain embodiments, an anti-EGFR binding site comprises a VHCDR3 and/or a VLCDR3 sequence set forth in FIG. 9. In certain embodiments, an anti-EGFR binding site comprises 1, 2 or 3 CDRs of one of the VH domains set forth in FIG. 9 and/or 1, 2 or 3 CDRs of one of the VL domains set forth in FIG. 9. Binding sites may also comprise one or more CDRs set forth in FIG. 9, wherein 1, 2 or 3 aas have been changed, e.g., substituted, added or deleted, provided that the binding sites are still able to bind specifically to their target.

[0577] In certain embodiments, TFcAs comprise one or more variable domains set forth in FIG. 9. For example, an anti-c-Met binding site may comprise a VH and/or VL sequence set forth in FIG. 9, such as the variable domains of the humanized antibody 5D5 (US2006/0134104) or the anti-c-Met binding site 2. Exemplary anti-EGFR binding sites comprise a VH and/or a VL sequence set forth in FIG. 9, such as those of panitumumab, 2224, cetuximab or humanized cetuximab H1L1, H1L2, H2L1 or H2L2 (see Example 3).

[0578] In certain embodiments, anti-c-Met/anti-EGFR TFcAs comprise an anti-c-Met Fab and an anti-EGFR scFv. Table 14 shows combinations of CDRs or variable domains of each of the following anti-c-Met and anti-EGFR aa sequences that may be used for forming TFcAs. The Table provides a SEQ ID NO if the sequence is provided herein or a “yes” if a combination is possible, but the resulting aa sequence is not specifically provided. A person of skill in the art will be able to create such a molecule without undue experimentation based on the fact that all the elements of such proteins and nucleotide sequences encoding such are provided herein.

TABLE 14
Heavy chains of exemplary TFcAs

| | | Anti-c-Met Fab | |
|---|---|---|---|
| | | Humanized 5D5 | Binding site 2 |
| Anti- | panitumumab | SEQ ID NO: 235, | yes |
| EGFR | | 343, 225, 227 and | |
| scFv | | 229 | |
| | 2224 | SEQ ID NO: 239 | yes |
| | cetuximab H1L1 | SEQ ID NO: 260 | SEQ ID NO: 291 |
| | cetuximab H1L2 | SEQ ID NO: 281 | yes |
| | cetuximab H2L1 | SEQ ID NO: 283 | yes |
| | cetuximab H2L2 | SEQ ID NO: 285 | yes |

[0579] Light chains that may be used with the heavy chains in Table 14 are the light chains of the particular anti-c-Met Fab used in the TFcA. For example, a TFcA comprising a VH domain from humanized 5D5, e.g., TFcAs comprising any one of SEQ ID NOs:225, 227, 229, 235, 239, 260, 281, 283, 285 and 342, may be used with a light chain comprising the VL domain of humanized 5D5, i.e., SEQ ID NO:231. A TFcA comprising a VH domain from the anti-c-Met binding site 2, e.g., TFcAs comprising SEQ ID NO:291, may be used with a light chain comprising the VH domain of the anti-c-Met binding site 2, e.g., the VL domain of SEQ ID NO:289.

[0580] Antigen binding sites, e.g., the ones described herein, may be engineered for enhanced stability, reduced heterogeneity, enhanced expression, enhanced solubility or other desirable characteristic. Methods for engineering of antibody fragments, such as scFv, VH, VL, and Fab with enhanced stability and increased expression are described, e.g., in US 2006/0127893 US 2009/0048122 and references therein.

[0581] Variable domains may differ from those set forth herein in, or in at most, 1, 2, 3, 4, 5, 6, 7, 8, 9, 10, 15, 20, 25, 30, 50, 100 aas, provided that a binding site with a modified variable region retains its ability to bind specifically to its target antigen, e.g., a human antigen selected from c-MET, ErbB2, ErbB3, ErbB4, IGF1R, IGF2R, Insulin receptor, RON, EGFR, VEGFR1, VEGFR2, TNFR, FGFR1-4, PDGFR (alpha and beta), c-Kit, EPCAM and EphA2. Variable domains for use in TFcAs, e.g., TFcBAs, may also comprise a VH or VL aa sequence that is at least 70%, 75%, 80%, 85%, 90%, 95%, 97%, 98% or 99% identical to the VH or VL aa sequence set forth in FIG. 9, provided that a binding site with a modified variable domain retains its ability to bind specifically to its target antigen.

[0582] Anti-c-METand/or anti-EGFR TFcBAs may also comprise a binding site that binds to the same epitope on human c-Met or human EGFR as the binding sites provided herein, such as the ones having sequences set forth in FIG. 9. Binding sites encompassed herein may also competitively block or compete with the binding of a binding site described herein, such as the ones having sequences set forth in FIG. 9. A TFcA comprising a binding site that competes with a binding site described herein for binding to a target antigen or epitope include the binding sites that are capable of displacing a reference binding site (e.g., as described herein), e.g., when added in an ELISA after the reference binding site, as well as binding sites that prevent a reference binding site from binding when the binding site is added after the reference binding site to an ELISA.

[0583] TFcAs may also comprise variable domains from anti-c-Met, anti-c-Kit, anti-ErbB2, anti-ErbB3, anti-ErbB4, anti-IGF1R, anti-IGF2R, anti-Insulin receptor, anti-RON, anti-VEGFR1, anti-VEGFR2, anti-TNFR, anti-FGFR1, anti-FGFR2, anti-FGFR3, anti-FGFR4, anti-PDGFR alpha, anti-PDGFR beta, anti-EPCAM, anti-EphA2 or anti-EGFR antibodies known in the art. Known anti-c-Met antibodies are set forth in U.S. Pat. No. 5,686,292, U.S. Pat. No. 7,476,724, WO 2004/072117, WO 2004/108766, WO 2005/016382, WO 2005/063816, WO 2006/015371, WO 2006/104911, WO 2007/126799, and WO 2009/007427. Exemplary known anti-EGFR antibodies include ABX-EGF (Abgenix) (Yang, X. D., et al., Crit. Rev. Oncol./Hematol. 38 (2001) 17-23) and humanized ICR62 (WO 2006/082515). Exemplary anti-c-Kit antibodies are set forth in U.S. Pat. No. 7,915,391 and EP 0586445B1. Exemplary anti-ErbB2 antibodies are set forth in U.S. Pat. No. 5,821,337 and U.S. Pat. No. 7,560,111. Exemplary anti-ErbB3 antibodies are set forth in U.S. Pat. No. 7,705,130, U.S. Pat. No. 7,846,440 and WO 2011/136911. Exemplary anti-ErbB4 antibodies are set forth in U.S. Pat. No. 7,332,579 and US 2010/0190964. Exemplary anti-IGF1R antibodies are set forth in U.S. Pat. No. 7,871,611 and U.S. Pat. No. 7,700,742. Exemplary anti-Insulin receptor antibodies are set forth in Bhaskar V. et al, Diabetes. 2012 May; 61(5):1263-71. Exemplary anti-RON antibodies are set forth in WO 2012/006341, US 2009/0226442, and U.S. Pat. No. 7,947,811. Exemplary anti-VEGFR1 antibodies are set forth in WO 2005/037235. Exemplary anti-VEGFR2 antibodies are set forth in U.S. Pat. No. 8,057,791 and U.S. Pat. No. 6,344,339. Exemplary anti-TNFR1 antibodies are set forth in EP 1972637B1 and US 2008/0008713. Exemplary anti-FGFR1 antibodies are set forth in Ronca R et al, Mol Cancer Ther; 9(12); 3244-53, 2010, and WO 2005/037235. Exemplary anti-FGFR2 antibodies are set forth in WO 2011/143318. Exemplary anti-FGFR3 antibodies are set forth in WO 2010/002862 and EP 1423428B1. Exemplary anti-FGFR4 antibodies are set forth in WO 03/063893, WO 2008/052796 and US 2010/0169992. Exemplary anti-PDGFR alpha antibodies are set forth in U.S. Pat. No. 8,128,929 and WO 1995/000659. Exemplary anti-PDGFR beta antibodies are set forth in U.S. Pat. No. 7,740,850. Exemplary anti-EPCAM antibodies are set forth in U.S. Pat. No. 7,976,842, US 2003/0157054, and WO 2001/007082. Exemplary anti-EphA2 antibodies are set forth in EP 1575509B1, U.S. Pat. No. 7,402,298, and U.S. Pat. No. 7,776,328. Exemplary CD-44m antibodies are set forth in U.S. Pat. No. 8,071,072, WO 2008/079246, U.S. Pat. No. 6,972,324. Exemplary CEA antibodies are set forth in U.S. Pat. No. 7,626,011. Exemplary ALK antibodies are set forth in U.S. Pat. No. 6,696,548, U.S. Pat. No. 7,902,340, and WO 2008/131575. Exemplary AXL antibodies are set forth in US 2010/0330095, US 2012/0121587, and WO 2011/159980.

[0584] In another embodiment, a binding site is a binding peptide. c-Met binding peptides are known e.g. from Matzke, A., et al., Cancer Res 65 (14) (2005) 6105-10. And Tam, Eric, M., et al., J. Mol. Biol. 385 (2009)79-90.

[0585] Binding sites preferably bind specifically to their target with Kd of 10⁻⁶, 10⁻⁷, 10⁻⁸, 10⁻⁹ M, or 10⁻¹⁰ M or an even lower Kd value, as measured, e.g., by surface plasmon resonance (e.g., using a BIAcore system).

[0586] TFcAs may bind specifically to any target protein, e.g., soluble or membrane human target proteins. Exemplary target proteins include human receptor proteins selected from the group consisting of ErbB2, ErbB3, ErbB4, IGF1R, IGF2R, Insulin receptor, RON, VEGFR1, VEGFR2, TNFR, FGFR1-4, PDGFR (alpha and beta), c-Kit, c-Met, EPCAM and EphA2.

### Exemplary Heavy and Light Chains

[0587] In one embodiment, a TFcA comprises a heavy chain and a light chain. In one embodiment, an anti-c-Met/anti-EGFR TFcBA comprises a heavy chain comprising an aa sequence set forth in FIG. 9 and/or a light chain comprising an aa sequence set forth in Example 3.

[0588] TFcBAs may also comprise a heavy chain and/or a light chain that comprise an aa sequence that differs from an aa sequence set forth in FIG. 9 in, or in at most 1, 2, 3, 4, 5, 6, 7, 8, 9, 10, 15, 20, 25, 30, 50, 100, 200, or 300 aas, provided that the TFcBA has the desired biological characteristic(s), as further described herein. A TFcBAs may also comprise a heavy chain and/or a light chain comprising an aa sequence that is at least 70%, 75%, 80%, 85%, 90%, 95%, 97%, 98% or 99% identical to the aa sequence of a heavy chain or light chain of FIG. 9, wherein the TFcBA has the desired biological characteristic(s).

[0589] TFcBAs may also comprise more than 2 binding sites, in which case, the heavy chain will comprise 1, 2, 3, 4 or more VH domains, which may be linked to the N- and/or C-terminus of any one of the following molecules: Fab-TFc-scFv; Fab-TFc-Fab; scFv-TFc-scFv; and scFv-TFc-Fab. The additional binding sites may be either Fabs or scFvs.

### Biological Activities of TFcAs

[0590] In certain embodiments, a TFcA, e.g., a TFcBA, binding to one or more target proteins inhibits signal transduction mediated by the one or more target proteins. For example, an anti-c-Met+anti-EGFR TFcBA may inhibit signal transduction mediated through either or both of c-Met and EGFR. Inhibition of signal transduction may be evidenced, e.g., by inhibition of phosphorylation of EGFR and ERK. In certain embodiments, a TFcA inhibits phosphorylation of c-Met, EGFR and/or ERK by at least 30%, 40%, 50%, 60%, 70%, 80%, 85%, 90%, 95%, 98%, 99% or more, relative to phosphorylation in the absence of the TFcA, when determined, e.g., at the end of the experiment, e.g., as set forth in the Examples. Preferred TFcAs inhibit c-Met and/or EGFR signal transduction, e.g., measured by inhibition of phosphorylation of c-Met and EGFR, nearly completely, e.g., by at least 90%, 91%, 92%, 93%, 94%, 95%, 96%, 97%, 98%, 99% or 99.5%.

[0591] Although the biological characteristics described in this section are described mostly in the context of anti-c-Met/anti-EGFR TFcBAs, the description also applies to other TFcBAs, as well as monovalent TFcAs.

[0592] Inhibition of a) ligand mediated phosphorylation of c-Met, and b) ligand-mediated phosphorylation of EGFR can be demonstrated by the ability of a TFcBA to reproducibly decrease the level of phosphorylation of a) c-Met induced by an HGF family ligand, b) EGFR induced by an EGFR ligand, e.g., EGF, or c) ERK induced by a c-Met ligand or an EGFR ligand, each relative to the phosphorylation in control cells that are not contacted with the TFcBA. The cell which expresses c-Met and/or EGFR can be a naturally occurring cell or a cell of a cell line or can be recombinantly produced by introducing nucleic acid encoding c-Met and/or EGFR into a host cell. In certain embodiments, a TFcBA inhibits a HGF family ligand mediated phosphorylation of c-Met by at least about 5%, 10%, 20%, 30%, 40%, 50%, 60%, 70%, 80%, 85%, 90%, 91%, 92%, 93%, 94%, 95%, 96%, 97%, 98% or 99%, or more, as determined, for example, by ELISA, and calculated as set forth in the Examples. In certain embodiments, a TFcBA inhibits EGF-mediated phosphorylation of EGFR by at least about 5%, 10%, 20%, 30%, 40%, 50%, 60%, 70%, 80%, 85%, 90%, 91%, 92%, 93%, 94%, 95%, 96%, 97%, 98% or 99%, or more, as determined, for example, by ELISA, and calculated as set forth in the Examples. In certain embodiments, a TFcBA inhibits EGF and/or c-Met-mediated phosphorylation of ERK by at least about 5%, 10%, 20%, 30%, 40%, 50%, 60%, 70%, 80%, 85%, 90%, 91%, 92%, 93%, 94%, 95%, 96%, 97%, 98% or 99%, or more, as determined, for example, by ELISA, and calculated as set forth in the Examples.

[0593] TFcBAs may inhibit ligand induced phosphorylation of c-Met by at least 70% or 80%, ligand induced phosphorylation of EGFR by at least 85%, 90% or 95% and optionally ligand induced phosphorylation of ERK by at least 5% or 10%. TFcBAs may also inhibit ligand induced phosphorylation of c-Met by at least 85%, ligand induced phosphorylation of EGFR by at least 85% and optionally ligand induced phosphorylation of ERK by at least 5%. In certain embodiments, TFcBAs inhibit ligand induced phosphorylation of c-Met by at least 50% and ligand induced phosphorylation of EGFR by at least 90%, and optionally ligand induced phosphorylation of ERK by at least 5%.

[0594] TFcBAs may also be defined by the EC50 (i.e. the concentration of TFcBA at which 50% of maximum inhibition is obtained) of their inhibition of phosphorylation of one or more of c-Met, EGFR and ERK, which EC50s may be determined as further described herein. For example, TFcBAs disclosed herein may inhibit phosphorylation of c-Met with an EC50 of 10⁻⁸ M, 10⁻⁹ M, 10⁻¹⁰ M or lower. They may inhibit phosphorylation of EGFR with an EC50 of 10⁻⁸ M, 10⁻⁹ M, 10⁻¹⁰ M or lower. They may inhibit phosphorylation of ERK with an EC50 of 10⁻⁷ M, 10⁻⁸ M, 10⁻⁹ M, 10⁻¹⁰ M or lower. Some TFcBAs disclosed herein inhibit phosphorylation of c-Met by at least 80% or 85% with an EC50 of 10⁻⁸ M, 10⁻⁹ M, 10⁻¹⁰ M or lower; inhibit phosphorylation of EGFR by at least 80% or 85% with an EC50 of 10⁻⁸ M, 10⁻⁹ M, 10⁻¹⁰ M or lower; and optionally inhibit phosphorylation of ERK by at least 5% with an EC50 of 10⁻⁷ M, 10⁻⁸ M, 10⁻⁹ M, 10⁻¹⁰ M or lower. In some cases, essentially complete blockage of either or both of phosphorylation of c-Met and phosphorylation of EGFR will be obtainable with a TFcBA herein disclosed.

[0595] In certain embodiments, a solution comprising TFcAs at a concentration of 0.3, 0.5, 1, 2, 3, 4, 5, 6, 7, 8, 9, 10, 11, 12, 13, 14, 15 mg/ml or more (or ranges of concentrations between any of these two numbers) comprises more than 70%, 75%, 80%, 85%, 90%, 95%, 96%, 97%, 98% or 99% of TFcBAs in unaggregated form (referred to in this context as monomers) as determined e.g., by Size Exclusion Chromatography (SEC) e.g., following, a stability test as described below. The percentage of monomers may be determined in a solution after one of the following stability tests: a) incubation at 4° C. for 1, 2, 3, 4, 5, or 6 days, or 1, 2, 3 or more weeks; b) incubation at room temperature for 1, 2, 3, 4, 5, or 6 days, or 1, 2, 3 or more weeks; c) incubation at 37° C. for 1, 2, 3, 4, 5, or 6 days, or 1, 2, 3 or more weeks; d) 1, 2, 3, 4 or 5 cycles of freeze/thaw, and e) agitation, e.g., gentle agitation on the orbital shaker at room temperature, e.g., for 1, 2, 3, 4, 5 or more hours.

[0596] In certain embodiments, a TFcA exhibits a stability after 1, 2, 3, 4 or 5 days of incubation in serum at 37° C. of at least 70%, 75%, 80%, 85%, 90%, 95%, 96%, 97%, 98% or 99%, relative to its stability at day 0, where the stability of a protein is determined by, e.g., SEC or by measuring its ability to bind to one or more of its target antigens after incubation.

[0597] In certain embodiments, a TFcA has a melting temperature (Tm) as determined e.g., by Differential Scanning Fluorimetry (DSF) of at least 50° C., 55° C., 58° C. or 60° C., as described in the Examples.

[0598] TFcAs may have a combination of two or more of the characteristics set forth herein. For example, a TFcBA may inhibit ligand induced phosphorylation of c-Met by at least 70% and ligand induced phosphorylation of EGFR by at least 70%, and also exhibit one or more of the following characteristics: (i) a Tm, as determined by DSF, of at least 55 or 60° C.; and (ii) be at least 70%, 80% or 90% monomeric in PBS at 10 mg/mL after 5 or more days at room temperature, 2 weeks at 4° C., one or more cycles of freeze-thaw or gentle agitation. In certain embodiments, TFcBAs have a Tm of at least 60° C. and stability at room temperature, 4° C. or 37° C. of at least 90% (concentration of monomer after incubation under these conditions relative to the initial concentration of monomer).

[0599] In certain embodiments, a TFcA composition comprises one or more of the following characteristics: 1) at least 50%, 60%, 70%, 80%, 90% or more of the proteins are visible on SDS PAGE after purification on protein A; 2) at least 50%, 60%, 70%, 80%, 90% or more of observed species on SDS-PAGE gels are of the correct molecular weight; 3) the thermal stability profile, as measured by Differential Scanning Fluorimetry, does not show molten globular behavior; 4) does not comprise more than 50%, 60%, 70%, 80%, 90%, 95%, 98% or 99% or more monomer as visualized by SEC; and 5) inhibits more than 95% of EGF receptor signaling activated by addition of exogenous EGF ligand, as measured by pEGFR inhibition.

[0600] Standard assays may be used for determining the biological activity and characteristics of TFcAs, such as TFcBAs. Exemplary assays are provided in the Examples.

### Nucleic Acids, Expression Vectors and Host Cells

[0601] Provided herein are nucleic acids, e.g., DNA and RNA, encoding the polypeptides described herein. Exemplary nucleotide sequences provided herein are those encoding the aa sequences set forth in the Figures. In certain embodiments, a nucleotide sequence encoding a heavy or light chain of a TFcA is linked to a sequence that enhances or promotes the expression of the nucleotide sequence in a cell to produce a protein. Such nucleic acids may be encompassed within a vector, e.g., an expression vector.

[0602] For the purposes of being secreted, a heavy and/or light chain of a TFcA preferably comprises a signal sequence, which is normally cut off after secretion to provide a mature polypeptide. The following signal sequences may be used: MGFGLSWLFLVAILKGVQC (SEQ ID NO:241): for use, e.g., in expressing heavy chains; and MGTPAQLLFLLLLWLPDTTG (SEQ ID NO:243) for use, e.g., in expressing light chains.

[0603] An exemplary nucleotide sequence encoding SEQ ID NO:241 is atgggcttcggactgtcgtggctttttctggtggcgattcttaagggggtccagtgc (SEQ ID NO:240) and an exemplary nucleotide sequence encoding SEQ ID NO:243 is atgggcacccccgcacagctcttgttcttgctgcttctttggctccctgacacaactggt (SEQ ID NO:242).

[0604] Nucleic acids, e.g., DNA, that comprise a nucleotide sequence that is at least about 70%, 75%, 80%, 90%, 95%, 97%, 98% or 99% identical to a nucleotide sequence encoding a polypeptide described herein or a nucleotide sequence set forth herein, and which encode a heavy and or light chain of a TFcA, or portion thereof, as further described herein, are also encompassed herein. Such nucleotide sequences may encode a protein set forth herein or may encode a protein that is at least 70%, 75%, 80%, 85%, 90%, 95%, 97%, 98% or 99% identical or similar to a protein set forth herein or a portion thereof (e.g., a domain), such as an aa sequence set forth in any one of the Figures.

[0605] Also encompassed herein are cells, e.g., host cells, comprising a nucleic acid or a vector provided herein.

[0606] The TFcAs described herein may be produced by recombinant means. Methods for recombinant production are widely known in the state of the art and comprise protein expression in prokaryotic and eukaryotic cells with subsequent isolation of the antibody and usually purification to a pharmaceutically acceptable purity. For the expression of the TFcAs in a host cell, nucleic acids encoding the respective polypeptides, e.g., light and heavy chains, are inserted into expression vectors by standard methods. Expression is performed in appropriate prokaryotic or eukaryotic host cells like CHO cells, NSO cells, SP2/0 cells, HEK293 cells, COS cells, PER.C6 cells, yeast, or E. coli cells, and the TFcA is recovered from the cells (supernatant or cells after lysis). General methods for recombinant production of antibodies are well-known in the state of the art and described, for example, in the review articles of Makrides, S. C., Protein Expr. Purif 17 183-202 (1999); Geisse, S., et al, Protein Expr. Purif. 8 271-282 (1996); Kaufman, R. J., MoI. Biotechnol. 16 151-161 (2000); Werner, R.G., Drug Res. 48 870-880 (1998).

[0607] The TFcAs may be suitably separated from the culture medium by conventional immunoglobulin purification procedures such as, for example, protein A-Sepharose, hydroxylapatite chromatography, gel electrophoresis, dialysis, or affinity chromatography. DNA and RNA encoding the TFcAs are readily isolated and sequenced using conventional procedures. The hybridoma cells can serve as a source of such DNA and RNA. Once isolated, the DNA may be inserted into expression vectors, which are then transfected into host cells such as HEK 293 cells, CHO cells, or myeloma cells that do not otherwise produce immunoglobulin protein, to obtain the synthesis of recombinant TFcAs in the host cells.

[0608] Aa sequence variants (or mutants) of the TFcAs may be prepared by introducing appropriate nucleotide changes into the TFcA DNA, or by nucleotide synthesis.

[0609] “Host cell” denotes any kind of cellular system which can be engineered to generate the TFcAs described herein. In one embodiment, HEK293 cells and CHO cells are used as host cells. Expression in NSO cells is described by, e.g., Barnes, L. M., et al, Cytotechnology 32 109-123 (2000); Barnes, L. M., et al., Biotech. Bioeng. 73 261-270 (2001). Transient expression is described by, e.g., Durocher, Y., et al., Nucl. Acids. Res. 30 E9 (2002). Cloning of variable domains is described by Orlandi, R., et al., Proc. Natl. Acad. Sci. USA 86 3833-3837 (1989); Carter, P., et al., Proc. Natl. Acad. Sci. USA 89 4285-4289 (1992); and Norderhaug, L., et al., J. Immunol. Methods 204 77-87 (1997). An exemplary transient expression system (HEK 293) is described by Schlaeger, E.-J., and Christensen, K., in Cytotechnology 30 71-83 (1999) and by Schlaeger, E.-J., in J. Immunol. Methods 194 191-199 (1996).

[0610] The control sequences that are suitable for prokaryotes, for example, include a promoter, optionally an operator sequence, and a ribosome binding site. Eukaryotic cells are known to utilize promoters, enhancers and polyadenylation signals.

[0611] A nucleic acid is “operably linked” when it is placed in a functional relationship with another nucleic acid sequence. For example, DNA for a pre-sequence or secretory leader is operably linked to DNA for a polypeptide if it is expressed as a pre-protein that participates in the secretion of the polypeptide; a promoter or enhancer is operably linked to a coding sequence if it affects the transcription of the sequence; or a ribosome binding site is operably linked to a coding sequence if it is positioned so as to facilitate translation. Generally, “operably linked” means that the DNA sequences being linked are contiguous, and, in the case of a secretory leader, contiguous and in reading frame. However, enhancers do not have to be contiguous. Linking is accomplished by ligation at convenient restriction sites. If such sites do not exist, the synthetic oligonucleotide adaptors or linkers are used in accordance with conventional practice.

[0612] Purification of TFcAs may be performed in order to eliminate cellular components or other contaminants, e.g. other cellular nucleic acids or proteins, by standard techniques, including alkaline/SDS treatment, CsCl banding, column chromatography, agarose gel electrophoresis, and others well known in the art. See Ausubel, F., et al., ed. Current Protocols in Molecular Biology, Greene Publishing and Wiley Interscience, New York (1987). Different methods are well established and widespread used for protein purification, such as affinity chromatography with microbial proteins (e.g. protein A or protein G affinity chromatography), ion exchange chromatography (e.g. cation exchange (carboxylmethyl resins), anion exchange (amino ethyl resins) and mixed-mode exchange), thiophilic adsorption (e.g. with beta-mercaptoethanol and other SH ligands), hydrophobic interaction or aromatic adsorption chromatography (e.g. with phenyl-sepharose, aza-arenophilic resins, or m-aminophenylboronic acid), metal chelate affinity chromatography (e.g. with Ni(II)- and Cu(II)-affinity material), size exclusion chromatography, and electrophoretical methods (such as gel electrophoresis, capillary electrophoresis) (Vijayalakshmi, M. A. Appl. Biochem. Biotech. 75 93-102 (1998)).

### Methods of Using TFcAs

[0613] Provided herein are methods of using TFcAs, e.g., TFcBAs. The TFcBAs can be used for treating a disease or disorder associated with receptor dependent signaling, including a variety of cancers.

[0614] In one embodiment, a method is provided for inhibiting proliferation of a tumor cell expressing the targets of a TFcA, e.g., c-Met, ErbB2, ErbB3, ErbB4, IGF1R, IGF2R, Insulin receptor, RON, EGFR, VEGFR1, VEGFR2, TNFR, FGFR1-4, PDGFR (alpha and beta), c-Kit, EPCAM and/or EphA2. A method may comprise contacting the tumor cell with a TFcA such that proliferation of the tumor cell is inhibited, slowed down, or stopped or such that the tumor cell dies.

[0615] Provided herein are methods for treating a disease or disorder associated with the signaling pathway of the targets of a TFcBA, e.g., c-Met, ErbB2, ErbB3, ErbB4, IGF1R, IGF2R, Insulin receptor, RON, EGFR, VEGFR1, VEGFR2, TNFR, FGFR1-4, PDGFR (alpha and beta), c-Kit, EPCAM and/or EphA2, by administering to a patient a TFcBA in an amount effective to treat the disease or disorder. Suitable diseases or disorders include, for example, a variety of cancers including, but not limited to breast cancer and those set forth below. In one embodiment, a method for treating a subject having a proliferative disease, such as cancer, comprises administering to a subject in need thereof a therapeutically effective amount of one or more TFcA.

[0616] Also provided is a method for (or a TFcA, e.g., a medicament for) treating a tumor expressing the target(s) of a TFcA, e.g., a TFcBA, e.g., c-Met, ErbB2, ErbB3, ErbB4, IGF1R, IGF2R, Insulin receptor, RON, VEGFR1, VEGFR2, TNFR, FGFR1-4, PDGFR (alpha and beta), c-Kit, EPCAM, EphA2 and/or EGFR, in a patient, the method comprising administering an amount of a TFcA effective to slow down or stop tumor growth, to stop or to shrink a tumor or to slow or stop tumor invasivness or tumor metastasis). A tumor expressing c-Met, ErbB2, ErbB3, ErbB4, IGF1R, IGF2R, Insulin receptor, RON, VEGFR1, VEGFR2, TNFR, FGFR1-4, PDGFR (alpha and beta), c-Kit, EPCAM, EphA2 and/or EGFR may be treated including tumors of the following cancers: gastric, esophageal, colorectal, non-small cell lung, pancreatic, prostate, renal, and thyroid cancers, hepatocellular carcinoma, glioma/glioblastoma, and breast cancer (basal/triple-negative and HER2+).

[0617] A method of treating a tumor or a subject having a tumor can further comprise administering a second anti-cancer agent in combination with the TFcA. Thus novel compositions are contemplated comprising a TFcA, together with a second anti-cancer agent, typically a biologic agent together with at least one pharmaceutically acceptable carrier or excipient.

[0618] Also provided are kits comprising one or more TFcAs. The kits may include a label indicating the intended use of the contents of the kit and optionally including instructions for use of the kit in treating a disease or disorder associated with a target of a TFcA dependent signaling, e.g., EGFR and/or c-Met dependent signaling. The term label includes any writing, marketing materials or recorded material supplied on or with the kit, or which otherwise accompanies the kit.

### Pharmaceutical Compositions

[0619] In another aspect, a composition, e.g., a pharmaceutical composition, is provided for treatment of a tumor in a patient, as well as methods of use of each such composition to treat a tumor in a patient. The compositions provided herein contain one or more of the antibodies, e.g., TFcAs, disclosed herein, formulated together with a pharmaceutically acceptable carrier. As used herein, “pharmaceutically acceptable carrier” includes any and all solvents, dispersion media, coatings, antibacterial and antifungal agents, isotonic and absorption delaying agents, and the like that are physiologically compatible. Preferably, the carrier is suitable for intravenous, intramuscular, subcutaneous, parenteral, spinal or epidermal administration (e.g., by injection or infusion). Depending on the route of administration, the antibody may be coated in a material to protect it from the action of acids and other natural conditions that may inactivate proteins.

[0620] Pharmaceutical compositions may be administered alone or in combination therapy, i.e., combined with other agents. For example, the combination therapy can include an antibody of the present disclosure with at least one additional therapeutic agent, such as an anti-cancer agent. Pharmaceutical compositions can also be administered in conjunction with another anti-cancer treatment modality, such as radiation therapy and/or surgery.

[0621] A composition of the present disclosure can be administered by a variety of methods known in the art. As will be appreciated by the skilled artisan, the route and/or mode of administration will vary depending upon the desired results.

[0622] To administer a composition provided herein by certain routes of administration, it may be necessary or desirable to coat the antibody with, or co-administer the antibody with, a material to prevent its inactivation. For example, the antibody may be administered to a patient in an appropriate carrier, for example, in liposomes, or a diluent. Pharmaceutically acceptable diluents include saline and aqueous buffer solutions. Liposomes include water-in-oil-in-water CGF emulsions as well as conventional liposomes.

[0623] Pharmaceutically acceptable carriers include sterile aqueous solutions or dispersions and sterile powders for the extemporaneous preparation of sterile injectable solutions or dispersion. The use of such media and agents for pharmaceutically active substances is known in the art. Except insofar as any excipient, diluent or agent is incompatible with the active compound, use thereof in the pharmaceutical compositions provided herein is contemplated. Supplementary active compounds (e.g., additional anti-cancer agents) can also be incorporated into the compositions.

[0624] Therapeutic compositions typically must be sterile and stable under the conditions of manufacture and storage. The composition can be formulated as a solution, microemulsion, liposome, or other ordered structure suitable to high drug concentration. The carrier can be a solvent or dispersion medium containing, for example, water, ethanol, polyol (for example, glycerol, propylene glycol, and liquid polyethylene glycol, and the like), and suitable mixtures thereof. Saline solutions and aqueous dextrose and glycerol solutions can be employed as liquid carriers, particularly for injectable solutions. The composition, if desired, can also contain minor amounts of wetting or solubility enhancing agents, stabilizers, preservatives, or pH buffering agents. In many cases, it will be useful to include isotonic agents, for example, sodium chloride, sugars, polyalcohols such as mannitol, sorbitol, glycerol, propylene glycol, and liquid polyethylene glycol in the composition. Prolonged absorption of the injectable compositions can be brought about by including in the composition an agent that delays absorption, for example, monostearate salts and gelatin.

### EXAMPLES

[0625] The following examples should not be construed as limiting the scope of this disclosure.

[0626] Throughout the examples, the following materials and methods are used unless otherwise stated. In general, the practice of the techniques of the present disclosure employs, unless otherwise indicated, conventional techniques of chemistry, molecular biology, recombinant DNA technology, immunology (especially, e.g., antibody technology), pharmacology, pharmacy, and standard techniques in polypeptide preparation.

### Example 1

### Identification of Stable Tandem Fc Structures

[0627] This example describes the identification of stable multivalent Ab formats. In this Example and in Example 2, protein constructs were used that do not contain binding sites. Several formats were compared, and each of these formats was derived from either one of the following two tandem Fc constructs:

1) TFc “23” or “IgG1 TFc,” which comprises an IgG1 TFc comprising an IgG1 hinge; an IgG1l CH2 domain comprising the substitution N297Q; an IgG1 CH3 domain comprising the substitutions T366S/L368A/Y407V; a TFc linker consisting of (G4S)₈ (SEQ ID NO: 491), an IgG1 hinge that does not comprise the upper hinge; an IgG1 CH2 domain comprising the substitution N297Q; and an IgG1 CH3 domain comprising the substitution T366W. This construct comprises the aa sequence set forth as SEQ ID NO:293 (see FIG. 11); and
2) TFc “39” or “IgG1/IgG4 TFc,” which comprises an IgG1/IgG4 tandem TFc comprising a hybrid IgG1/IgG4 hinge comprising an IgG1 upper hinge and a core and lower IgG4 hinge; an IgG4 CH2 domain comprising the substitution T299K; an IgG1 CH3 domain comprising the substitutions T366S/L368A/Y407V; a TFc linker consisting of (G4S)₈ (SEQ ID NO: 491); an IgG4 hinge that does not comprise the upper hinge; an IgG4 CH2 domain comprising the substitution T299K; and an IgG1 CH3 domain comprising the substitution T366W. This construct comprises the aa sequence set forth as SEQ ID NO:319 (see FIG. 11).

[0628] Six modified versions of TFc 23 and 39 were created, and these are listed in Table 15. Briefly, a first modification was the addition of a disulfide bond in the viscinity of the knob or hole (TFc 23A). Another modification was the change of the knob hole of 23A for a smaller knob/hole (TFc 23B). Another modification introduced 1 or 2 cysteines in the upper hinge of the first hinge, to create disulfide bridges within the TFc (TFc 23 D and C, respectively). Another modification introduced a C-terminal cysteine in the CH3 domain (TFc 23E). Another modification in the TFc consisted of reducing the length of the TFc linker by 20 aas (TFc 23F, also referred to as “23G”). The aa sequences of these newly modified TFcs (shown in Table 15) are the same as those set forth in FIGS. 6 and 7, except that the TFcs used in this example did not comprise part of the upper hinge, i.e., aas EPKSC, and comprised a signal peptide. The nucleotide and aa sequences of these TFcs are shown in FIG. 11, and the identity of each of the domains or elements of the TFcs is set forth in Tables 12 and 13, with the only difference that the first hinge does not comprise EPKSC at its N-terminus.

TABLE 15
TFcs (“(G₄S)₈” and “(G₄S)₄” disclosed as SEQ ID NOS 491 and 496,
respectively)

| Name | | | |
|---|---|---|---|
| of | | TFc | SEQ ID NO |
| TFc | Modifications to TFc | linker | of TFc |
| 23 | T366S/L368A/Y407V::T366W | (G₄S)₈ | SEQ ID NO: 293 |
| 39 | | | SEQ ID NO: 319 |
| 23A | Y349C/T366S/L368A/ | (G₄S)₈ | SEQ ID NO: 295 |
| 39A | Y407V:: S354C/T366W | | SEQ ID NO: 321 |
| 23B | Y407T::T366Y | (G₄S)₈ | SEQ ID NO: 297 |
| 39B | | | SEQ ID NO: 323 |
| 23C | H224C/T225C/T366S/L368A/ | (G₄S)₈ | SEQ ID NO: 299 |
| 39C | Y407V::T366W | | SEQ ID NO: 325 |
| 23D | T223C/T366S/L368A/ | (G₄S)₈ | SEQ ID NO: 301 |
| 39D | Y407V::T366W | | SEQ ID NO: 327 |
| 23E | T366S/L368A/Y407V/C-term | (G₄S)₈ | SEQ ID NO: 303 |
| 39E | Cysteine::T366W/C-term Cysteine | | SEQ ID NO: 329 |
| 23G* | T366S/L368A/Y407V::T366W | (G₄S)₄ | SEQ ID NO: 305 |

*23G contains the same TFc as that referred to elsewhere as “23F.”

[0629] The different nucleic acids (having SEQ ID NOs: 292, 294, 296, 298, 300, 302, 304, 318, 320, 322, 324, 326, or 328) were transiently transfected into Freestyle 293F cells (Invitrogen) and purified with a one step protein A purification essentially as follows. The nucleic acids encoding the proteins are cloned as single proteins into the expression plasmid using standard recombinant DNA techniques. An expression vector employed is pCEP4 (Invitrogen). Expression plasmids are transfected using Polyethylene imine (2.5 μg/ml culture) and DNA (1 μg/ml cell culture). Transfected cells are incubated at 37° C., 5% CO₂ for six days and then harvested. All proteins are purified using protein A affinity protocol, in accordance with manufacturer's instructions. The protein A affinity step is used to selectively and efficiently bind the fusion proteins out of harvested cell culture fluids (HCCF). This removes >95% of product impurities in a single step with high yields and high throughput. The portion of desired molecular form for fusion proteins after this step was in the range of 60 to 98 percent. MABSELECT from GE is used as the Protein A affinity resin. The purified material was concentrated and dialyzed into PBS.

### A) Percentage Monomers

[0630] TFc solutions were subjected to the determination of the percentage monomer present by Size Exclusion Chromatography (SEC) either in the initial solution or after incubation at 4° C., 37° C., after freeze-thaw or after gentle agitation on the orbital shaker at room temperature. SEC was performed essentially as follows. SEC is performed using Agilent 1100 Series HPLC system. 50 μg of each molecule is injected on a TSK Super SW3000 gel column (Tosoh Biosciences, P/N 18675). PBS is used as running and equilibration buffer at a flow rate of 0.35 ml/min.

[0631] Table 16 provides the percentage monomer of exemplary TFcs in initial solutions at the indicated concentrations.

TABLE 16
Percentage monomer of exemplary TFcs

| | | % monomer |
|---|---|---|
| Protein | Concentration | at 0 days |
| 23G | 3 mg/ml | 87.9 |
| 23 | 5 mg/ml | 71.4 |
| 39C | 0.5 mg/ml | 39.5 |
| 39D | 0.5 mg/ml | 50.9 |
| 39 | 12.5 mg/ml | 66.4 |

[0632] In another experiment, the percentage monomer was determined in the initial solution after concentration of the molecules essentially as described above. Table 17 provides the results.

TABLE 17
Percentage monomer in initial solution after concentration

| | mg/ml | % monomer |
|---|---|---|
| 23A | 5.2 | 67% |
| 23D | 10.0 | 78% |
| 23E | 16.8 | 74% |

[0633] A compilation of Tables 16 and 17 is shown below in Table 18

TABLE 18
Percentage monomer of exemplary TFcs

| | | | | % |
|---|---|---|---|---|
| | Initial | % monomer at | Second | monomer at |
| | Concentration | initial | concentration | second con- |
| Protein | (mg/ml) | concentration | (mg/ml) | centration |
| 23 | 5.0 | 71.4% | | |
| 23A | 0.23 | 83.7% | 5.2 | 67% |
| 23B | 1.22 | 58.2% | | |
| 23C | 5.0 | 74.6% | | |
| 23D | 0.32 | 82.0% | 10.0 | 78% |
| 23E | 0.74 | 77.5% | 16.8 | 74% |
| 23G | 0.27 | 87.9% | | |
| 39 | 12.5 | 66.4% | | |
| 39A | n/d | n/d | | |
| 39B | 0.95 | 55.0% | | |
| 39C | 0.5 | 74.6% | | |
| 39D | 0.5 | 50.9% | | |
| 39E | 0.95 | 55.0% | | |
| 39G | 0.27 | 74.8% | | |

[0634] Table 19 shows the percentage monomer of TFcs 39E and 23C in solution as determined after having been exposed to various conditions.

TABLE 19
Percentage monomer of 39E and 23C after exposure to various conditions

| | 39E | 23C |
|---|---|---|
| Condition | 12.9 mg/ml | 5 mg/ml |
| 0 days | 89.7% | 74.6% |
| 4° C., 2 weeks | 90.6% | 82.5% |
| Room temp., 10 | 90.3% | 83.0% |
| days | | |
| 37° C., 2 weeks | 88.1% | — |
| Freeze/thaw | 90.9% | 85.0% |
| Agitate | 90.7% | — |

[0635] The results indicate that the TFcs have very different stabilities in the solution at day 0 and under the various conditions tested. 39E and 23G appear to have better stability than others.

### B) SDS PAGE Analysis

[0636] The TFcs were run on a 4-12% SDS-PAGE gel in non-denaturing conditions and visualized by Coomassie stain. The results are shown in FIG. 8.

### Example 2

### Synthesis of Second Generation TFcs

[0637] To further improve the characteristics of the TFc molecules, further modifications were made to them. The modifications included (i) varying the length of the TFc linker (“23E (35L)”, “39E (35L)”, “23E (30L)”, “39E (30L)”, “23E (25L)” and “39E (25L)”); (ii) changing the combination of AEMs and C-terminal cysteine modifications within each of the two CH3 domains (“23E (35L) Inverted” and (“39E (35L) Inverted”); and (iii) changing the mutations that enhance CH3 association (“231”, “391”, “23J” and “39J”). These modifications are summarized in Table 20. The aa sequences of these newly modified TFcs are set forth in FIG. 11 and the identity of each of their domains or elements is set forth in Tables 12 and 13.

TABLE 20
Second generation TFcs (“KSCDKT,” “GEC,” “(G₄S)₇,” “(G₄S)₆,” “(G₄S)₅”
and “(G₄S)₈” disclosed as SEQ ID NOS 167, 168, 499, 498, 497 and 491, respectively)

| Name of TFcBA | Modifications to TFc | TFc linker | SEQ ID NO of TFc |
|---|---|---|---|
| 23E (35L) | T366S/L368A/Y407V/C-term Cysteine | (G₄S)₇ | SEQ ID NO: 185 |
| 39E (35L) | KSCDKT::T366W/C-term Cysteine GEC | | SEQ ID NO: 211 |
| 23E (35L) | T366S/L368A/Y407V/C-term Cysteine | (G₄S)₇ | SEQ ID NO: 187 |
| Inverted 39E | GEC::T366W/C-term Cysteine KSCDKT | | SEQ ID NO: 213 |
| (35L) Inverted | | | |
| 23E (30L) | T366S/L368A/Y407V/C-term Cysteine | (G₄S)₆ | SEQ ID NO: 189 |
| 39E (30L) | KSCDKT::T366W/C-term Cysteine GEC | | SEQ ID NO: 215 |
| 23E (25L) | T366S/L368A/Y407V/C-term Cysteine | (G₄S)₅ | SEQ ID NO: 191 |
| 39E (25L) | KSCDKT::T366W/C-term Cysteine GEC | | SEQ ID NO: 217 |
| 23I | S364H/F405A::Y349T/T394F | (G₄S)₈ | SEQ ID NO: 193 |
| 39I | | | SEQ ID NO: 219 |
| 23J | K370D/K392D/K409D::E356K/E357K/D399K | (G₄S)₈ | SEQ ID NO: 195 |
| 23J | | | SEQ ID NO: 221 |

[0638] The second generation TFcs were expressed and purified essentially as described in Example 1.

### A) Percentage Monomers

[0639] TFc solutions were subjected to the determination of the percentage monomer present by SEC either in the initial solution or after 7 days at 4° C. SEC was performed essentially as described in Example 1.

[0640] Table 21 provides the percentage monomer of exemplary second generation TFcs in initial solutions and after 7 days at 4° C.

TABLE 21
Percentage monomer of exemplary TFcs (“(G₄S)2”
disclosed as SEQ ID NO: 494)

| | | Day 1 | Day 7 |
|---|---|---|---|
| Fc1 | 23E/25L | 74.8% | |
| Fc2 | 23E/35L | Not measured | 77.9% |
| Fc3 | 39E/30L | 80.2% | |
| Fc4 | 39E/35L | Not measured | 78.9% |
| Fc5 | 39E/35L inv | 79.3% | |
| Fc6 | 23E/30L | 80.2% | |
| Fc7 | 23E/35L inv | 79.1% | |
| Fc8 | 39E/25L | 78.1% | |
| Original IgG1 Fc | 23E/40L | 78.8% | |
| Original IgG1/4 Fc | 39E/40L | 88.3% | |

[0641] The results indicate that a 40 aa linker, e.g., in molecules 23E and 39E, results in a more stable TFc than a shorter linker

### Example 3

### Exemplary Anti-c-Met/Anti-EGFR TFcBAs

### A) Exemplary Anti-c-Met Binding Sites

[0642] A TFcBA may comprise an anti-c-Met binding site comprising or consisting of that of the humanized 5D5 Ab (U.S. Pat. No. 7,476,724). The heavy chain may comprise the following Fab domain or VH domain thereof:

1) Without signal peptide:

[chemical structure]

YFPEPVTVSWNSGALTSGVHTFPAVLQSSGLYSLSSVVTVPSSSLGTQTY
ICNVNHKPSNTKVDKKV

(SEQ ID NO: 223; the CDRs are underlined with a dotted line, and the CH1 domain is underlined)
2) Including the exemplary signal peptide consisting of SEQ ID NO: 241 (underlined)

[chemical structure]

YSLSSVVTVPSSSLGTQTYICNVNHKPSNTKVDKKV

(SEQ ID NO: 245; the signal peptide is underlined and boldface, the CDRs are underlined with a dotted line, and the CH1 domain is underlined)

[0643] The light chain may comprise the following Fab domain or VH domain thereof:

1) Without signal peptide:

[chemical structure]

KVQWKVDNALQSGNSQESVTEQDSKDSTYSLSSTLTLSKADYEKHKVYAC
EVTHQGLSSPVTKSFNRGEC

(SEQ ID NO: 231; the CDRs are underlined with a dotted line, and the CL domain is underlined)
2) Including the exemplary signal peptide consisting of SEQ ID NO: 243:

[chemical structure]

LKSGTASVVCLLNNFYPREAKVQWKVDNALQSGNSQESVTEQDSKDSTYS
LSSTLTLSKADYEKHKVYACEVTHQGLSSPVTKSFNRGEC

(SEQ ID NO: 247; the signal peptide is underlined and boldface, the CDRs are underlined with a dotted line, and the CL domain is underlined)

[0644] A TFcBA may also comprise an anti-c-Met binding site comprising or consisting of the following heavy and light chain portions, and referred to herein as “anti-c-Met binding site 2.” The heavy chain may comprise the following Fab domain or VH domain thereof:

1) Without signal peptide:

[chemical structure]

FPEPVTVSWNSGALTSGVHTFPAVLQSSGLYSLSSVVTVPSSSLGTQTYI
CNVNHKPSNTKVDKKV

(SEQ ID NO: 287; the CDRs are underlined with a dotted line, and the CH1 domain is underlined)
2) Including the exemplary signal peptide consisting of SEQ ID NO: 241 (underlined):

[chemical structure]

SSKSTSGGTAALGCLVKDYFPEPVTVSWNSGALTSGVHTFPAVLQSSGLY
SLSSVVTVPSSSLGTQTYICNVNHKPSNTKVDKKV

(SEQ ID NO: 256; the signal peptide is underlined and boldface; the CDRs are underlined with a dotted line, and the CH1 domain is underlined)

[0645] The light chain may comprise the following Fab domain or VH domain thereof:

1) Without signal peptide:

[chemical structure]

TFGGGTKVEIKRTVAAPSVFIFPPSDEQLKSGTASVVCLLNNFYPREAKV
QWKVDNALQSGNSQESVTEQDSKDSTYSLSSTLTLSKADYEKHKVYACEV
THQGLSSPVTKSFNRGEC

(SEQ ID NO: 289; the CDRs are underlined with a dotted line, and the CL domain is underlined)
2) Including the exemplary signal peptide consisting of SEQ ID NO: 243:

[chemical structure]

SGTASVVCLLNNFYPREAKVQWKVDNALQSGNSQESVTEQDSKDSTYSLS
STLTLSKADYEKHKVYACEVTHQGLSSPVTKSFNRGEC

(SEQ ID NO: 345; the signal peptide is underlined and boldface; the CDRs are underlined with a dotted line, and the CL domain is underlined)

[0646] The aa sequences of the heavy chain of an exemplary mature TFcBA comprising in amino to carboxy terminal order: i) the Fab domain of the anti-c-Met binding site 5D5 (SEQ ID NO:223); ii) a TFc comprising AEM 1 and DiS 2 (SEQ ID NO:181); and iii) the panitumumab anti-EGFR scFv H1L1 having SEQ ID NO:233 (see below) is set forth as SEQ ID NO:235 (FIG. 9). The aa sequences of the heavy chain of an exemplary mature TFcBA comprising in amino to carboxy terminal order: i) the Fab domain of the anti-c-Met binding site 2 (SEQ ID NO:287), ii) a TFc comprising AEM 1 and DiS 2 (SEQ ID NO:181); and iii) the cetuximab anti-EGFR scFv H1L1 having SEQ ID NO:258 (see below) is set forth as SEQ ID NO:291 (FIG. 9). Generally, the exemplary anti-c-Met Fab heavy chain sequences provided here may be linked to any of the TFcs, or constructs comprising a TFc, disclosed herein. These proteins may be expressed with a signal sequence, which may be the signal sequence consisting of SEQ ID NO:241.

B) Exemplary Anti-EGFR scFvs

[0647] A TFcBA may comprise any of the following anti-EGFR scFvs (or variable domains or CDRs thereof):

[0648] 1) Panitumumab (VECTIBIX) scFv

[0649] The aa sequence of the VH and VL domains of panitumumab is provided in U.S. Pat. No. 6,235,883, and are assembled into an scFv having the following aa sequence:

[chemical structure]

(SEQ ID NO:233; the scFv linker is in italics and the VH and VL CDRs are underlined with a dotted line)

[0650] 2) 2224 scFv

[0651] The aa sequence of the VH and VL domains of Ab 2224 is provided in U.S. Patent Publication No 2010/0009390, and are assembled into an scFv having the following aa sequences:

[chemical structure]

(SEQ ID NO:237; the scFv linker is in italics and the VH and VL CDRs are underlined with a dotted line)

[0652] 3) Humanized cetuximab scFv

[0653] The variable regions of Cetuximab were humanized and used for constructing the following scFvs, wherein the CDRs are underlined with dotted lines, the scFv linker is italicized and aa modifications resulting from the humanization are in lower case letters:

[0654] 3.1) cetuximab scFv H1 L1

(SEQ ID NO:258)

[chemical structure]

[0655] 3.2) cetuximab scfv H1 L2

(SEQ ID NO: 275)

[chemical structure]

[0656] 3.3) cetuximab scFv H2 L1

(SEQ ID NO: 277)

[chemical structure]

[0657] 3.4) cetuximab scFv H2 L2

(SEQ ID NO: 279)

[chemical structure]

[0658] The VH and VL domains of the humanized cetuximab Abs may be used in any other format of Ab, e.g., an Ab having a naturally occurring structure comprising two heavy chains and two light chains.

[0659] The aa sequence of the heavy chain of an anti-c-Met/anti-EGFR TFcBA comprising i) the humanized 5D5 anti-c-Met VH domain (SEQ ID NO:223); ii) a TFc comprising AEM 1 and DiS 2 (SEQ ID NO:181); and iii) the panitumumab anti-EGFR scFv having SEQ ID NO:233 is set forth as SEQ ID NO:235 (FIG. 9). The aa sequences of the heavy chain of anti-c-Met/anti-EGFR TFcBAs comprising the same binding sites as those in SEQ ID NO:235, but comprising a different TFc are set forth in SEQ ID NOs: 343, 225, 227 and 229 (FIG. 9). The aa sequence of the heavy chain of an anti-c-Met/anti-EGFR TFcBA comprising i) the humanized 5D5 anti-c-Met VH domain (SEQ ID NO:223); ii) a TFc comprising AEM 1 and DiS 2 (SEQ ID NO:181); and iii) the 2224 anti-EGFR scFv having SEQ ID NO:237 is set forth as SEQ ID NO:239 (FIG. 9). The aa sequences of the heavy chain of an anti-c-Met/anti-EGFR TFcBA comprising i) the humanized 5D5 anti-c-Met VH domain (SEQ ID NO:223); ii) a TFc comprising AEM 1 and DiS 2 (SEQ ID NO:181); and iii) a cetuximab anti-EGFR scFv consisting of SEQ ID NO:258, 275, 277 or 279 are set forth as SEQ ID NOs:260, 281, 283 and 285, respectively (FIG. 9). Generally any of the anti-EGFR scFvs disclosed herein, or their variable or CDR sequences, may be linked to any of the TFcs, or constructs comprising a TFc, disclosed herein.

[0660] Nucleotide sequences encoding the Fab domains, scFvs and TFcBAs are provided in FIG. 10.

[0661] Other exemplary anti-c-Met/anti-EGFR TFcBAs are set forth in Table 21, wherein each of the sequences may be connected to the adjacent sequence in amino to carboxy terminal order without intervening sequence.

TABLE 21
Exemplary TFcBAs

| Anti-c-Met heavy | | Connecting | Anti-EGFR |
|---|---|---|---|
| chain Fab | TFc | linker | scFv |
| Humanized 5D5 (SEQ | IgG1 TFc (SEQ ID NO: 171, 173, 175, 177, 179, | (G4S)2 | Panitumumab |
| ID NO: 223 or 245) | 181, 183, 185, 187, 189, 191, 193 or 195) or | | (SEQ ID |
| with light chain having | IgG1/IgG4 hybrid TFc (SEQ ID NO: 197, 199, | | NO: 233) |
| SEQ ID NO: 231 or | 201, 203, 205, 207, 209, 211, 213, 215, 217, 219 | | |
| 247 | or 221) | | |
| Humanized 5D5 (SEQ | IgG1 TFc (SEQ ID NO: 171, 173, 175, 177, 179, | (G4S)2 | 2224 (SEQ ID |
| ID NO: 223 or 245) | 181, 183, 185, 187, 189, 191, 193 or 195) or | | NO: 237) |
| with light chain having | IgG1/IgG4 hybrid TFc (SEQ ID NO: 197, 199, | | |
| SEQ ID NO: 231 or | 201, 203, 205, 207, 209, 211, 213, 215, 217, 219 | | |
| 247 | or 221) | | |
| Humanized 5D5 (SEQ | IgG1 TFc (SEQ ID NO: 171, 173, 175, 177, 179, | (G4S)2 | Cetuximab |
| ID NO: 223 or 245) | 181, 183, 185, 187, 189, 191, 193 or 195) or | | H1L1 (SEQ ID |
| with light chain having | IgG1/IgG4 hybrid TFc (SEQ ID NO: 197, 199, | | NO: 258) |
| SEQ ID NO: 231 or | 201, 203, 205, 207, 209, 211, 213, 215, 217, 219 | | |
| 247 | or 221) | | |
| Humanized 5D5 (SEQ | IgG1 TFc (SEQ ID NO: 171, 173, 175, 177, 179, | (G4S)2 | Cetuximab |
| ID NO: 223 or 245) | 181, 183, 185, 187, 189, 191, 193 or 195) or | | H1L2 (SEQ ID |
| with light chain having | IgG1/IgG4 hybrid TFc (SEQ ID NO: 197, 199, | | NO: 275) |
| SEQ ID NO: 231 or | 201, 203, 205, 207, 209, 211, 213, 215, 217, 219 | | |
| 247 | or 221) | | |
| Humanized 5D5 (SEQ | IgG1 TFc (SEQ ID NO: 171, 173, 175, 177, 179, | (G4S)2 | Cetuximab |
| ID NO: 223 or 245) | 181, 183, 185, 187, 189, 191, 193 or 195) or | | H2L1 (SEQ ID |
| with light chain having | IgG1/IgG4 hybrid TFc (SEQ ID NO: 197, 199, | | NO: 277) |
| SEQ ID NO: 231 or | 201, 203, 205, 207, 209, 211, 213, 215, 217, 219 | | |
| 247 | or 221) | | |
| Humanized 5D5 (SEQ | IgG1 TFc (SEQ ID NO: 171, 173, 175, 177, 179, | (G4S)2 | Cetuximab |
| ID NO: 223 or 245) | 181, 183, 185, 187, 189, 191, 193 or 195) or | | H2L2 (SEQ ID |
| with light chain having | IgG1/IgG4 hybrid TFc (SEQ ID NO: 197, 199, | | NO: 279) |
| SEQ ID NO: 231 or | 201, 203, 205, 207, 209, 211, 213, 215, 217, 219 | | |
| 247 | or 221) | | |
| Binding site 2 (SEQ | IgG1 TFc (SEQ ID NO: 171, 173, 175, 177, 179, | (G4S)2 | Panitumumab |
| ID NO: 287 or 256) | 181, 183, 185, 187, 189, 191, 193 or 195) or | | (SEQ ID |
| with light chain having | IgG1/IgG4 hybrid TFc (SEQ ID NO: 197, 199, | | NO: 233) |
| SEQ ID NO: 289 or | 201, 203, 205, 207, 209, 211, 213, 215, 217, 219 | | |
| 345 | or 221) | | |
| Humanized 5D5 (SEQ | IgG1 TFc (SEQ ID NO: 171, 173, 175, 177, 179, | (G4S)2 | 2224 (SEQ ID |
| ID NO: 223 or 245) | 181, 183, 185, 187, 189, 191, 193 or 195) or | | NO: 237) |
| with light chain having | IgG1/IgG4 hybrid TFc (SEQ ID NO: 197, 199, | | |
| SEQ ID NO: 231 or | 201, 203, 205, 207, 209, 211, 213, 215, 217, 219 | | |
| 247 | or 221) | | |
| Humanized 5D5 (SEQ | IgG1 TFc (SEQ ID NO: 171, 173, 175, 177, 179, | (G4S)2 | Cetuximab |
| ID NO: 223 or 245) | 181, 183, 185, 187, 189, 191, 193 or 195) or | | H1L1 (SEQ ID |
| with light chain having | IgG1/IgG4 hybrid TFc (SEQ ID NO: 197, 199, | | NO: 258) |
| SEQ ID NO: 231 or | 201, 203, 205, 207, 209, 211, 213, 215, 217, 219 | | |
| 247 | or 221) | | |
| Humanized 5D5 (SEQ | IgG1 TFc (SEQ ID NO: 171, 173, 175, 177, 179, | (G4S)2 | Cetuximab |
| ID NO: 223 or 245) | 181, 183, 185, 187, 189, 191, 193 or 195) or | | H1L2 (SEQ ID |
| with light chain having | IgG1/IgG4 hybrid TFc (SEQ ID NO: 197, 199, | | NO: 275) |
| SEQ ID NO: 231 or | 201, 203, 205, 207, 209, 211, 213, 215, 217, 219 | | |
| 247 | or 221) | | |
| Humanized 5D5 (SEQ | IgG1 TFc (SEQ ID NO: 171, 173, 175, 177, 179, | (G4S)2 | Cetuximab |
| ID NO: 223 or 245) | 181, 183, 185, 187, 189, 191, 193 or 195) or | | H2L1 (SEQ ID |
| with light chain having | IgG1/IgG4 hybrid TFc (SEQ ID NO: 197, 199, | | NO: 277) |
| SEQ ID NO: 231 or | 201, 203, 205, 207, 209, 211, 213, 215, 217, 219 | | |
| 247 | or 221) | | |
| Humanized 5D5 (SEQ | IgG1 TFc (SEQ ID NO: 171, 173, 175, 177, 179, | (G4S)2 | Cetuximab |
| ID NO: 223 or 245) | 181, 183, 185, 187, 189, 191, 193 or 195) or | | H2L2 (SEQ ID |
| with light chain having | IgG1/IgG4 hybrid TFc (SEQ ID NO: 197, 199, | | NO: 279) |
| SEQ ID NO: 231 or | 201, 203, 205, 207, 209, 211, 213, 215, 217, 219 | | |
| 247 | or 221) | | |

### Example 4

### Methods for Preparing and Characterizing TFcAs or TFcs

### A) Protein Expression and Purification

[0662] Stable Transfection: Nucleic acids are transfected into CHO-K1 cells (Chinese hamster ovary; ATCC cat #CCL-61) using 1:1(:1) plasmid ratio, and are purified with a one step protein A purification method, e.g., according to the following protocol. The nucleic acids encoding the TFcAs or TFcs are cloned as single proteins into the expression plasmids using standard recombinant DNA techniques. An exemplary expression vector employed is pMP 10K (SELEXIS). Expression plasmids are linearized, purified using QIAquick purification kit (QIAGEN), and co-transfected into CHO-K1 cells using Lipofectamine LTX (Invitrogen). Transfected cells are recovered with Ham's F12 medium (Gibco) containing 10% FBS for 2 days without selection pressure, then with selection pressure for 4 days. After 4 days, they are changed into serum-free medium (Hyclone) containing glutamine with selection pressure. After a week, cells are checked for expression and scaled up to desired volume. All proteins are purified using protein A affinity protocol, carried out in accordance with manufacturer's instructions. The protein A affinity step is used to selectively and efficiently bind the TFcA or TFc proteins out of harvested cell culture fluids (HCCF). This removes >95% of product impurities in a single step with high yields and high throughput. The portion of desired molecular form for TFcAs or TFcs after this step is expected to be in the range of 60 to 98 percent. MABSELECT from GE is used as the Protein A affinity resin. The purified material is concentrated and dialyzed into PBS.

[0663] Transient transfection: Nucleic acids are transiently transfected into Freestyle 293F cells (Invitrogen) and purified with a one-step protein A purification essentially as follows. The nucleic acids encoding the proteins are cloned as single proteins into the expression plasmid using standard recombinant DNA techniques. An exemplary expression vector employed is pCEP4 (Life Technologies cat #R790-07). Expression plasmids are transfected using Polyethylene imine (2.5 μg/ml culture) and DNA (1 μg/ml cell culture). Transfected cells are incubated at 37° C., 5% CO₂ for six days and then harvested. All proteins are purified using protein A affinity protocol, in accordance with manufacturer's instructions. The protein A affinity step is used to selectively and efficiently bind the fusion proteins out of harvested cell culture fluids (HCCF). This removes >95% of product impurities in a single step with high yields and high throughput. MABSELECT from GE is used as the Protein A affinity resin. The purified material is concentrated and dialyzed into PBS.

### B) SDS-PAGE Analysis

[0664] TFcBAs or TFcs are run on a 4-12% SDS-PAGE gel in non-denaturing conditions and visualized by Coomassie stain. This method may be used to determine whether a TFcA or TFc is properly formed or assembled.

### C) Thermal Stability Measurement by DSF

[0665] The temperature at which a TFcA or TFc unfolds is determined by Differential Scanning Fluorimetry (DSF) essentially as follows. The DSF assay is performed in the IQ5 Real Time Detection System (Bio-Rad). 20 μl solutions of 15 uM TFcA or TFc, 1× Sypro Orange (Invitrogen Life Technologies), and 1×PBS are added to the wells of a 96 well plate. The plate is heated from 20° C. to 90° C. with a heating rate of 1° C./min. Data is transferred to GraphPad Prism for analysis.

D) pEGFR Inhibition

[0666] Inhibition of signal transduction through EGFR, e.g., ligand-induced signal transduction, by a TFcBA may be determined by measuring the effect of the particular TFcA on the phosphorylation of EGFR.

[0667] The following protocol is used to measure inhibition of EGFR. Cells (e.g. A431 cells (ATCC cat #CRL-1555) or NCI-H322M (National Cancer Institute)) are maintained in DMEM medium supplemented with 10% fetal bovine serum, Penicillin/Streptomycin and L-glutamine. For signaling experiments, 3.5×10⁴ cells are plated in complete medium in 96-well tissue culture plates. The following day, complete medium is replaced with serum-free medium, and cells are incubated overnight at 37° C. Cells are pretreated for 2 hours with starting concentration of 300 nM and titrating 3-fold down for an 11 concentration dose for each TFcA or TFc, and then stimulated for 10 minutes with 8 nM EGF (Human recombinant EGF; Cat# AF-100-15; PeproTech, Inc.). Cells are washed with PBS and lysed in MPER buffer (cat #PI78505, VWR International) supplemented with protease and phosphatase inhibitors (cOmplete Protease Inhibitor Cocktail Tablet provided in EASY packs, cat #4693124001, Roche Diagnostics Corp; PhosSTOP Phosphatase Inhibitor Cocktail Tablets, cat #4906837001, Roche Diagnostics Corp). ELISAs for phospho-EGFR (pEGFR) are performed according to the manufacturer's protocols (pEGFR ELISA R&D kit (cat #: DYC1095-C)), with the exception that the capture Ab is EGFR Ab-11, Clone: 199.12 (Fisher Scientific Cat# MS396P1ABX). SuperSignal ELISA Pico Chemiluminescent Substrate (cat #PI37069, VWR International) is added and plates read on a PerkinElmer Envision plate reader. Luminescence values are plotted following normalization to the observed signal at the lowest concentration of TFcA or TFc. For data analyses, duplicate samples are averaged and error bars are used to represent the standard deviation between the two replicates. Inhibition curves and corresponding IC50 values are calculated using GraphPad Prism software (GraphPad Software, Inc.) via regression of the data to a 4 parameter logistic equation. To calculate percent inhibition, regressed values of maximal (‘max’) and minimum (‘min’) inhibitor potency can be utilized as follows:

curve_span=max−min;

baseline_span=max;

percent_inhibition=100*curve_span/baseline_span.

E) pERK Inhibition

[0668] Inhibition of signal transduction through c-Met and/or EGFR, e.g., ligand-induced signal transduction, by a TFcA may be determined by measuring the effect of the particular TFcA on the phosphorylation of ERK. The following protocol may be used to measure inhibition of pERK. Day 1: Actively midlog (about 80% confluency) growing cells (e.g., A431 cells) are split in DMEM (+10% FBS+L/glutamine+Pen/Strep) media. Approximately 35,000 cells are seeded/well in a 96 well-plate. Day 2: The media is changed from 10% FBS to serum-free media −0.5% FBS (+L/glutamine+Pen/Strep) media. Day 3: The inhibitors/antibodies are diluted into the appropriate volume of serum media. 100 μL of each inhibitor per concentration is added/well. The inhibitor is allowed to incubate at 37° C. for 2 hours. At the end of the 2 hour period, a final concentration of 8 nM EGF (Human recombinant EGF; Cat# AF-100-15; PeproTech, Inc.) is added to each inhibitor and each concentration of inhibitor for 10 min. The cells are washed 2× with cold PBS and later lysed in 40 μL/well of SureFire Lysis buffer (a 1:5 dilution of stock with water). The lysates are place in −80° C. usually within 5 min after lysis. Day 4: The protocol on performing the SureFire pERK 1/2 ELISA can be found in Perkin Elmer website (ALPHASCREEN PROTEIN A 10K PTS PerkinElmer Life Sciences, Inc. Cat #: 6760617M; TGR Surefire ERK1 384 Kit for 10,000 Ass; PerkinElmer Life Sciences, Inc. Cat #: TGRES10K). Essentially, the −80° C. lysate is thawed at room temperature. In the meantime, the reaction buffer is prepared in which the Activation Buffer and Reaction Buffer are mixed according to protocol. The Protein A detection kit reagents are added last to the reaction buffer prior to adding onto the 384 well plate. 4 μL of the thawed lysate is transferred onto a ProxiPlate 384, white shallow well plate (from Perkin Elmer; cat #6008280). After addition of the Protein A detection kit reagents, 7 μL of the final reaction buffer is transferred to each well (which already has 4 μL of the lysate in them). The plates are sealed tightly with aluminum sealer. The plate is spun down in an Eppendorf table top centrifuge at 1800 rpms for 1 minute. The plates are gently shaken at RT for 2 hours. The plates are then read in Perkin Elmer Envision Reader. Normalization of luminescence data and calculation of IC50 occurs as described for pEGFR.

### Example 5

### Protocols for Measurement of ELISA Plate-Based Antibody Binding

[0669] Binding of Bispecific Antibodies to Soluble cMet-Fc and EGFR-his

[0670] Reacti-bind plates (96 well) are coated with 50 μL of cMet-Fc (2 μg/mL in PBS), and incubated overnight at 4° C. Next day, the plates are washed with PBS-T (PBS+0.05% Tween-20), blocked for 1 hour at room temperature with 100 μL of blocking buffer, and washed again with PBS-T. Plates are incubated with 50 μL of bispecific antibodies at room temperature for 2 hours, and then washed with PBS-T. Antibody concentrations start at 500 nM (in PBS-T), and include ten additional two-fold dilutions and one blank (PBS-T only). Plates are then incubated with 50 μL of EGFR-his (at 1 μg/ml in PBS-T for one hour at room temperature. The plates are washed with PBS-T and then incubated with anti-his-HRP antibody diluted 1:10,000 in PBS-T for 1 hour at room temperature, and washed again with PBS-T. The plates are incubated with 100 μL of TMB substrate for 5-10 minutes at room temperature and the reaction is stopped by adding 100 μL of Stop solution. The absorbance was measured at 450 nm, and the resulting data analyzed using GraphPad Prism.

[0671] Exemplary results using TFcBAs in the method above can be seen in FIG. 15, which shows binding affinity of onartuzumab-39Egy-2224 (squares) and onartuzumab-39Egy-4-panitumumab (circles).

### Example 6

### Current Technologies for Asymmetric Fc-Domains Give Molecular Weight Heterogeneity

### Stable Transfection of CHO-K1 Cells

[0672] Suspension-adapted CHO-K1 cells are grown in Hyclone Media supplemented with 8 mM L-glutamine to a density of 2 million/mL. On the day of transfection, the cells are resuspended in a serum-free media (Opti-MEM I) at a density of 80,000 cells/mL. The cells (500 μL) are then transfected with 1 μg of total DNA (including 10 ng of pNeo vector, an in-house vector carrying the geneticin selection marker) using 2.75 μL of Lipofectamine in a 24 well plate. After 3 hours, 1 mL of recovery media (HAMS-F12+10% FBS) is added, and the transfected cells allowed to recover for 48 hours. The cells are then expanded into a 96-well plate, and the selection marker geneticin was added to the recovery media at 500 μg/ml. After 4 more days, the media is replaced with serum free Hyclone media (supplemented with L-glutamine), and the transfected cells allowed to adapt. After a week, the selected cells form colonies, and the wells are tested for desired characteristics with western blots from the supernatant. The desired clones are expanded to a 24-well plate, then to a T-25 flask, and eventually to a shake flask. The desired clones are confirmed with SDS-PAGE, and scaled up to the desired volume. The cells are harvested by centrifugation (6000 g, 30 min) when the viability falls below 80%, and the supernatant filtered using a 0.22 μm filter.

[0673] Cells were transfected as described aboved and analyzed as follows. Results are shown in Table 22 below.

[0674] A) Western Blot Protocol

[0675] Cell supernatants expressing onartuzumab were run on a 4-12% SDS-PAGE gel in non-denaturing conditions. The proteins were transferred to nitrocellulose paper using the Invitrogen iBlot. The blot was washed with PBS-T and then incubated for one hour with anti-human-FC conjugated to IRD700. The blot was washed three times with PBS-T and then imaged using the L1-Cor Odyssey. The results are shown in FIG. 12.

[0676] B) Percentage Monomers

[0677] TFc solutions were subjected to the determination of the percentage monomer present by SEC

in the initial solution. SEC was performed essentially as described in Example 1.

[0678] Table 22 provides the percentage monomer of exemplary second generation TFcs in initial solutions.

TABLE 22
Percentage monomer of exemplary onartuzumab clones

| Protein | High MW species | % monomer | Low MW species |
|---|---|---|---|
| Onartuzumab1 | | 78 | 22 |
| Onartuzumab2 | | 75 | 25 |
| Onartuzumab3 | | n/d | |
| Onartuzumab4 | | 24 | 75 |
| Onartuzumab5 | | 89 | 11 |
| Onartuzumab6 | 2.2 | 98 | |

### Example 7

### Production and Analysis of Charged Aglycosylation Mutants

[0679] The identification of stable multivalent Ab formats is described below. Protein constructs were used that do not contain binding sites. Several formats were compared as shown in Table 23 and FIG. 17.

TABLE 23
TFcs

| Name | | SEQ ID NOs of TFc |
|---|---|---|
| of tandem Fc | Modifications to TFc CH2 domain | (aa/nucleotide) |
| Glyco_wt | None | 357/358 |
| Glyco_1 | N297D/T299S::N297D/T299S | 388/389 |
| Glyco_2 | T299K::N297D/T299S | 390/391 |
| Glyco_3 | N297D/T299S::T299K | 392/393 |
| Glyco_4 | N299K::N299D | 394/395 |
| Glyco_5 | N299D::N299K | 396/397 |
| Glyco_6 | N299D::N299D | 398/399 |

[0680] Nucleic acids (having SEQ ID NOs:357, and 389-399 (odd numbers) were transiently transfected into Freestyle 293F cells and purified with a one-step protein A purification followed by DSF essentially as described in Example 4.

TABLE 24
Percentage monomer of TFcs after exposure to various conditions

| Protein | Condition | mg/ml | % monomer |
|---|---|---|---|
| Glyco_wt | Initial purification | 10.6 | 86.6 |
| | 4 deg, 0 day | 10.6 | 79.7 |
| | Agitate | 10.6 | 79.3 |
| | 4 deg, 10 day | 10.6 | 78.6 |
| | 37 deg, 10 day | 10.6 | 75.5 |
| | 4 deg, 1 month | 10.6 | 77.5 |
| Glyco_1 | Initial purification | 3.7 | 83.2 |
| | 4 deg, 0 day | 11.2 | 83.0 |
| | Agitate | 11.2 | 82.6 |
| | 4 deg, 10 day | 11.2 | 82.4 |
| | 37 deg, 10 day | 11.2 | 80.3 |
| | 4 deg, 1 month | 11.2 | 84.7 |
| Glyco_2 | Initial purification | 1.3 | 78.6 |
| | 4 deg, 0 day | 8.4 | 78.0 |
| | Agitate | 8.4 | n/d |
| Glyco_3 | Initial purification | 3 | 76.4 |
| | 4 deg, 0 day | 12 | 75.0 |
| | Agitate | 12 | n/d |
| | 4 deg, 10 day | 12 | 73.5 |
| | 37 deg, 10 day | 12 | 71.6 |
| Glyco_4 | Initial purification | 4.2 | 84.5 |
| | 4 deg, 0 day | 10.1 | 83.5 |
| | Agitate | 10.1 | 83.6 |
| | 4 deg, 10 day | 10.1 | 83.0 |
| | 37 deg, 10 day | 10.1 | 80.8 |
| Glyco_5 | Initial purification | 9.5 | 77.1 |
| | 4 deg, 0 day | 9.5 | 76.3 |
| | Agitate | 9.5 | 76.5 |
| | 4 deg, 10 day | 9.5 | 76.6 |
| | 37 deg, 10 day | 9.5 | 73.7 |
| | 4 deg, 1 month | 9.5 | 76.5 |
| Glyco_6 | Initial purification | 6.3 | 81.7 |
| | 4 deg, 0 day | 12 | 80.6 |
| | Agitate | 12 | 81.2 |
| | 4 deg, 10 day | 12 | 81.0 |
| | 37 deg, 10 day | 12 | 77.3 |
| | 4 deg, 1 month | 12 | 80.8 |

### B) SDS PAGE Analysis

[0681] The TFcs were run on a 4-12% SDS-PAGE gel in denaturing conditions and visualized by Coomassie stain. The results are shown in FIG. 13A (non-reduced) and FIG. 13B (reduced).

### C) Thermal Stability Measurement by DSF

[0682] The temperature at which a TFcA or TFc unfolds is determined by Differential Scanning Fluorimetry (DSF) essentially as follows. The DSF assay is performed in the IQ5 Real Time Detection System (Bio-Rad). 20 μl solutions of 15 uM TFcA or TFc, 1× Sypro Orange (Invitrogen Life Technologies), and 1×PBS are added to the wells of a 96 well plate. The plate is heated from 20° C. to 90° C. with a heating rate of 1° C./min. Data is transferred to GraphPad Prism for analysis. Exemplary results from thermal stability determination by DSF for glycosylation site mutants are shown in Table 25.

TABLE 25
DSF of Tandem Fcs

| protein | Tm |
|---|---|
| glyco_wt | 60.5 |
| glyco_1 | 55.5 |
| glyco_2 | 57.9 |
| glyco_3 | 57.9 |
| glyco_4 | 57.3 |
| glyco_5 | 56.3 |
| glyco_6 | 51.5 |

### Example 8

### DSF Analysis of Backbone Variants

### Thermal Stability Measurement by DSF

[0683] The temperature at which a TFcA or TFc unfolds is determined by Differential Scanning

[0684] Fluorimetry (DSF) as described above. Results are shown in Table 26 below. These data show that backbone modifications such as the addition of a disulfide bridge and glycosylation mutations can improve thermal stability.

TABLE 26
DSF of Tandem Fcs with backbone variations

| Protein | Tm |
|---|---|
| Onartuzumab | 57.1 |
| Onartuzumab-23 | 46.9 |
| Onartuzumab-39 | 51.2 |
| Onartuzumab-23E | 57.8 |
| Onartuzumab-39Egy4 | 60.3 |
| Onartuzumab-39Egy4-cetuximab | 57.3 |
| Onartuzumab-39Egy4-panitumumab | n/a |
| Onartuzumab-39Egy4-2224 | 55.7 |

### Example 9

### Production and Analysis of Monovalent and Bispecific tFc Molecules Using Onartuzumab Binding Site

### Percent Monomer Determination Using Size Exclusion Chromatography

[0685] 50 μg of sample is injected on a TSKgel SuperSW3000 column (4.6 mm ID×30 cm) using 20 mM sodium phosphate (+300 mM NaCl) as running buffer. All measurements are performed on Agilent 1100 HPLC which is equipped with an auto sampler, a binary pump and a diode array detector. Percent monomers are determined by analyzing the data in Chemstation software. Typically, all the samples are only protein A purified and at a concentration of 5 mg/mL in 1×PBS.

TABLE 27
SEC Stability of TFcBA molecules at 4° C.

| | | Percent |
|---|---|---|
| | Percent monomers | monomers |
| Molecule name | (Day 0) | (Day 7) |
| Onartuzumab-23 | 72 | 76 |
| Onartuzumab-39 | 70 | 76 |
| Onartuzumab-23E | 89 | 89 |
| Onartuzumab-39EGY4 | 81 | 81 |
| Onartuzumab-39EGY4-2224 | 88 | 88 |
| Onartuzumab-39EGY4-panitumumab | 85 | 85 |
| Onartuzumab-39EGY4-cetuximab | 82 | 83 |

### Fortebio Binding—Protocol

[0686] Materials required: 96-well, black, round, flat bottom, polypropylene microplates (Greiner Bio-one #655209). Octet instrument and software (version 3.0). Protein A sensor tips (Fortebio, #18-5010). 1×PBS, antigen (his tagged cMET), antibodies.

[0687] Protocol: All reagents are equilibrated and samples are brought to room temperature. Protein A sensor tips (Fortebio, #18-5010) are hydrated for 10 min in 1×PBS. Kinetic assays are run using the Octet software and procedure per manufacturer's instruction. Assay steps typically include: 1-2 min of equilibration in 1×PBS, 4 min of antibody loading (conc: 50 μg/mL in 1×PBS), 1-2 min of baseline stabilization, 4 min of antibody:antigen association, and 4 min of antibody:antigen dissociation. 1×PBS is used as the matrix throughout. Data are analyzed with Octet Data Analysis software, processed, and fit to the curve using 1:1 binding model to determine kinetic parameters (Kₐ, Kₒₙ and K_{off})

TABLE 28
K_{d} of anti-cMet TFcs with various backbone modifications

| | K_{d} determined by Fortebio |
|---|---|
| Molecule or antibody name | (Binding to cMET.his) |
| Onartuzumab-23E | 1.3 nM |
| Onartuzumab-39EGY4 | 1.25 nM |
| Onartuzumab-23 | 1.24 nM |
| Onartuzumab-39 | 1.26 nM |
| Onartuzumab-39EGY4-224 | 1.29 nM |
| Onartuzumab-39EGY4-cetuximab | 0.9 nM |
| Onartuzumab-39EGY4-panitumumab | 1.6 nM |
| Onartuzumab | 1.2 nM |

### Example 10

### Signaling Inhibition by Onartuzumab and Bispecific Variants

[0688] To test the ability of the constructs in Table 28 to inhibit pMet, the TFc variants were tested in HGF-induced SW620 cells (ATCC cat #: CCL-227) as follows: On day 1, actively mid-log (about 80% confluence) growing cells (e.g., SW620 cells) are split in RPMI (+10% FBS+L/glutamine (2 mM)+Pen/Strep) media. Approximately 20,000 cells are seeded/well in a 96-well plate. On day 2, the media is changed from 10% FBS to serum-free media—RPMI+0.5% FBS (+L/glutamine+Pen/Strep) media. On day 3, the HGF (stimulated control) and various inhibitors/antibodies are diluted into the appropriate volume of serum free media. 100 μL of each inhibitor per concentration is added/well. The inhibitor is allowed to incubate at 37° C. for 2 hours. The cells are then washed 2× with cold PBS and later lysed in 50 μL/well of MPER (cat #PI78505, VWR International)+150 mM NaCl+Protease and Phosphatase Inhibitor buffer (cOmplete Protease Inhibitor Cocktail Tablet provided in EASY packs, cat #4693124001, Roche Diagnostics Corp; PhosSTOP Phosphatase Inhibitor Cocktail Tablets, cat #4906837001, Roche Diagnostics Corp). The lysates are placed in −80° C. usually within 5 minutes after lysis.

[0689] For measurement of pMet signal, an ELISA kit was used (Human Phospho-HGF R/c-MET DuoSet IC Economy Pack, cat #DYC2480E, R&D Systems). A 384-well High Binding Black Solid plate from Corning is coated with capture anti-MET antibody from R&D Systems at a final concentration of 4 μg/mL/well in PBS buffer. The plates are left at overnight at room temperature. On day 4, the −80° C. lysate is thawed at room temperature. Plates are then washed 3 times with 50 μl/well in the BIOTEK plate washer with PBST (PBS with 0.05% Tween-20). The 384-well plates are blocked with 50 μL/well 2% BSA/PBS for 1 hour at room temperature. Duplicate lysates are pooled into one well and diluted 2-fold in 2% BSA/0.1% Tween-20/25% MPER/PBS. Recombinant standard curves are prepared by making 10×2-fold serial dilutions in 2% BSA/0.1% Tween-20/25% MPER/PBS. ELISA plates are washed with 0.05% Tween-20/PBS. 20 μL lysates are transferred from the 96-well plate in quadruplicate to the 384-well plate. Plates are incubated at room temperature for 2 hours and washed 3 times with 0.05% Tween-20/PBS. 20 μL primary detection anti-phosphotyrosine antibody, 4G10 (cat#05-321, Millipore/Upstate), is added at a dilution of 1:1000 to the ELISA plates and incubated for 1 hour at room temperature. 20 μL of SuperSignal ELISA Pico Chemiluminescent Substrate (cat #PI37069, VWR International) is added per manufacturer's directions and read on Envision Plate Reader (Perkin Elmer). For data analyses, duplicate samples are averaged and error bars are used to represent the standard deviation between the two replicates. Inhibition curves and corresponding IC50 values are calculated using GraphPad Prism software (GraphPad Software, Inc.) via regression of the data to a 4 parameter logistic equation.

[0690] As shown in FIG. 16, all molecules tested inhibited pMet signaling in a similar manner, without regard to the identity of the TFc core region. The bivalent onartuzumab_{—}39Egy4_{—}2224, onartuzumab_{—}39Egy4_panitumumab, and onartuzumab_{—}39Egy4_cetuximab variants inhibited to a similar extent as did the monovalent onartuzumab_{—}39Egy4 variant.

### EQUIVALENTS

[0691] Those skilled in the art will recognize, or be able to ascertain and implement using no more than routine experimentation, many equivalents of the specific embodiments described herein. Such equivalents are intended to be encompassed by the following claims. Any combinations of the embodiments disclosed in the dependent claims are contemplated to be within the scope of the disclosure.

### INCORPORATION BY REFERENCE

[0692] The disclosure of each and every U.S. and foreign patent and pending patent application and publication referred to herein is specifically incorporated by reference herein in its entirety.

### Further Examples

### Section A-1

[0693] The following examples should not be construed as limiting the scope of this disclosure.

[0694] Throughout the examples, the following materials and methods are used unless otherwise stated. In general, the practice of the techniques of the present disclosure employs, unless otherwise indicated, conventional techniques of chemistry, molecular biology, recombinant DNA technology, immunology (especially, e.g., antibody technology), pharmacology, pharmacy, and standard techniques in polypeptide preparation.

[0695] As used in these Examples and in the Figures, “HGF” refers to the hepatocyte growth factor (sometimes referred to as scatter factor), e.g., Preprotech, catalog #100-39.

[0696] The human cell lines used in the techniques and examples described below may be obtained, as indicated, from American Type Culture Collection (ATCC, Manassas, Va.). Cell lines used in the examples are: A549 cells (ATCC CCL-185); NCI-H441 (ATCC HTB-174); HCC827 (ATCC CRL-2868); NCI-H2170 (ATCC CRL-5928); and U-87 MG (ATCC HTB-14).

[0697] The humanized, anti-human-c-Met monoclonal antibody OA-5D5, as disclosed in U.S. Pat. No. 8,361,744 with SEQ ID NO:45 (heavy chain) and SEQ ID NO:46 (light chain), and from U.S. Patent Publication No. 20110300146 with SEQ ID NO:196 (knob) is used as an anti-c-Met antibody control. In some embodiments, the anti-c-Met heavy chain and knob sequences each have a single mutation SEQ ID NO:45 and SEQ ID NO:196 to remove the CH2 glycosylation site. For example, see U.S. Pat. No. 7,476,724.

[0698] Antibodies described in this disclosure are abbreviated with the following style: e.g. Antibody #1 is Ab#1, Antibody #2 is Ab#2, Antibody #13 is Ab#13, etc.

### Example A-1

### Tandem-Fc Bispecific Antibody Format

[0699] The general structure of the bispecific antibodies disclosed herein comprises a bivalent antibody with a single Fab directed against c-Met, a “tandem-Fc’ (TFc) backbone structure (described in copending PCT Application Serial No. PCT/US2012/52490, e.g., SEQ ID NO:394 and 395), and a single scFv antibody fragment directed against EpCAM. The heavy chain of the bispecific antibody comprises a single polypeptide containing the following domains (N-terminus to C-terminus):

[0700] (i) Heavy chain of the c-Met Fab

[0701] (ii) Hybrid hinge containing IgG1 upper hinge and IgG4 middle and lower hinge

[0702] (iii) IgG4 CH2 domain #1 with T299K mutation

[0703] (iv) IgG1 CH3 domain #1 with T366S/L368A/Y407V mutations

[0704] (v) Disulfide bridge motif #1 (KSCDKT) (SEQ ID NO: 167)

[0705] (vi) (G₄S)₈ (SEQ ID NO: 491) polypeptide linker

[0706] (vii) Middle and lower hinge of IgG4

[0707] (viii) IgG4 CH2 domain #2 with T299D mutation

[0708] (ix) IgG1 CH3 domain #2 with T366W mutation

[0709] (x) Disulfide bridge motif #2 (GEC) (SEQ ID NO: 168)

[0710] (xi) Connecting polypeptide linker

[0711] (xii) Anti-EpCAM scFv

[0712] A schematic of the antibody domain structure can be found in FIG. 18.

### Example A-2

### Humanization of Anti-EpCAM scFv

[0713] A structure-guided approach was employed to create a panel of 13 humanized anti-EpCAM scFv variants deriving from the murine parent sequence (SEQ ID NOs: 486 & 487). The initial homology models of scFvs were built by MoIIDE using independent zero-gap templates for VH and VL domains and energy-refined using SCWRL A review of MoIIDE and SCWRL is disclosed, e.g., in Nature Protocols 3:1832-1847 (2008). The potential impact of the candidate mutations on stability was conducted by visual inspection using PyMOL or calculating energy differences using Eris. These scFv variants were incorporated into 13 bispecific antibodies (Ab#1, Ab#2, Ab#3, Ab#4, Ab#5, Ab#6, Ab#7, Ab#8, Ab#9, Ab#10, Ab#11, Ab#12, and Ab#13). Permutations used include three different antibody frameworks, removal of deamidation or oxidation sites in the CDR sequences, VH/VL sequence orientation, disulfide bridge addition, and intra-scFv protein linker sequence. An overview of the design permutations tested is shown in FIG. 2.

### Example A-3

### Protein Expression and Purification of Antibodies

[0714] A) Transient Transfection

[0715] Antibodies are expressed using a transient transfection protocol utilizing Freestyle 293F cells (Invitrogen). The nucleic acids encoding the proteins are cloned as single proteins into expression plasmids using standard recombinant DNA techniques. An exemplary expression vector employed is pCEP4 (Life Technologies, catalog #R790-07). Heavy chain and light chain sequences for the antibodies are cloned into separate vectors. Expression plasmids are transfected using polyethylene imine (2.5 μg per ml of cell culture) and DNA (1:1 ratio of heavy chain and light chain, with a combined total of 1 μg DNA per ml of cell culture). Transfected cells are incubated at 37° C., 5% CO₂ for six days and then harvested by centrifugation at 6000 g for 30 minutes followed by 0.2 μM filtration of the supernatant.

[0716] B) Stable Transfection

[0717] Antibodies are expressed via stable transfection into suspension adapted CKO-K1 cells (Chinese hamster ovary; ATCC catalog #CCL-61) essentially as follows. The nucleic acids encoding the antibodies are cloned as single proteins into expression plasmids using standard recombinant DNA techniques. An exemplary expression vector employed is pMP 10K (SELEXIS). Heavy chain and light chain sequences for the antibodies are cloned into separate vectors. Heavy and light chain expression plasmids are linearized, purified using QIAquick purification kit (QIAGEN), and co-transfected at a 1:1 ratio as follows.

[0718] Suspension-adapted CHO-K1 cells are grown in Hyclone SFM4-CHO media (Fisher Scientific, catalog #SH30548.02) supplemented with 8 mM L-glutamine (Life Technologies, catalog #25030-081) to a density of 2 million cells per ml. On the day of transfection, the cells are resuspended in Opti-MEM serum free media (Gibco, catalog #31985-062) at a density of 80,000 cells per ml. The cells (500 μL) are then transfected with 1 μg of total linearized DNA (including 10 ng of pNeo vector, an in-house vector carrying the geneticin selection marker) using 2.75 μL of Lipofectamine (Life Technologies, catalog #15338-100) in a 24 well plate. After 3 hours, 1 ml of recovery media (HAMS-F12 (Gibco)+10% FBS) is added, and the transfected cells allowed to recover for 48 hours. The cells are then expanded into a 96-well plate, and the selection marker geneticin was added to the recovery media at 500 μg/ml. After 4 more days, the media is replaced with serum free Hyclone SFM4-CHO media (supplemented with L-glutamine), and the transfected cells allowed to adapt. After a week, the selected cells form colonies, and the wells containing single colonies are tested for desired characteristics with western blots from the supernatant. The desired clones are expanded to a 24 well plate, then to a T-25 flask, and eventually to a 125 ml shake flask. Expression of antibody by the desired clones are confirmed with SDS-PAGE, and scaled up to the desired volume. The cells are harvested by centrifugation (6000 g, 30 min) when the viability falls below 80%, and the supernatant filtered using a 0.22 μm filter. Cell viability is assessed using trypan blue exclusion assay and is measured automatically using a Vi-CELL Cell Viability Analyzer (Beckmann Coulter).

[0719] C) Purification

[0720] All proteins are purified using a protein A affinity chromatography protocol in accordance with manufacturer's instructions, using MabSelect (GE Healthcare) as the Protein A affinity resin, on a AKTA Explorer 100 FPLC (GE Healthcare). The protein A affinity step is used to selectively and efficiently bind the antibodies out of harvested cell culture fluids. This removes >95% of product impurities in a single step with high yields and high throughput. The purified material is concentrated using Vivaspin centrifugal concentrators (GE Healthcare), and dialyzed into PBS using Slide-A-Lyzer G2 Dialysis Cassettes (Pierce), both according to manufacturer's instructions.

### Example A-4

### Biophysical Characterization of Expressed Antibodies

[0721] A) SDS-PAGE Analysis

[0722] Sodium dodecyl sulfate polyacrylamide gel electrophoresis (SDS-PAGE) is used to assess the molecular weight of expressed antibodies, and determine whether an antibody is properly formed or assembled. Antibodies (2 μg each) are run on a 4-12% SDS-PAGE gel in either non-reducing or reducing conditions and visualized by Coomassie brilliant blue stain.

[0723] OA-5D5 was expressed using stable transfection and purified as described above, and visualized using SDS-PAGE. FIG. 3 depicts results for OA-5D5 deriving from 5 different clones under reducing and non-reducing conditions. Under non-reducing conditions, all OA-5D5 clones were observed to have a band with molecular weight of approximately 100 kilodaltons, corresponding to properly associated monovalent antibody. OA-5D5 clones also showed a band at approximately 25 kilodaltons, likely corresponding to excess light chain or Fc domain. Under reducing conditions, all OA-5D5 clones demonstrated two bands of approximately 25 and 50 kilodaltons, likely corresponding to OA-5D5 light chain and Fc domain (25 kDa) and heavy chain (50 kDa).

[0724] Ab#5, Ab#7, and Ab#13 were expressed using stable transfection and purified as described above, and visualized using SDS-PAGE. FIG. 4 depicts results for Ab#5, Ab#7, and Ab#13 under reducing and non-reducing conditions. For both conditions, Ab#5, Ab#7, and Ab#13 were observed to run at the expected molecular weight. Under non-reducing conditions, Ab#5, Ab#7, and Ab#13 were observed to have largely a single band with molecular weight of approximately 125 kilodaltons, corresponding to properly associated antibody light and heavy chain. Under non-reducing conditions, two bands of approximately 25 and 100 kilodaltons were observed corresponding to antibody light and heavy chain.

[0725] B) Percent Monomer Determination Using Size Exclusion Chromatography

[0726] Size exclusion chromatography may be used to assess the purity of expressed antibodies by characterizing the presence of aggregates or antibody fragments. To assess the percent monomer of the antibodies, 50 μg of sample is injected on a TSKgel SuperSW3000 column (4.6 mm ID×30 cm; Tosoh Bioscience) using 20 mM sodium phosphate+300 mM sodium chloride as running buffer. All measurements are performed on an Agilent 1100 HPLC which is equipped with an auto sampler, a binary pump and a diode array detector. Percent monomers are determined by analyzing the data in Agilent ChemStation software. Typically, samples are only protein A purified and run at a concentration of 5 mg/ml in 1×PBS.

[0727] Ab#1, Ab#2, Ab#3, Ab#4, Ab#5, Ab#6, Ab#7, Ab#8, Ab#9, Ab#10, Ab#11, Ab#12, and Ab#13 were expressed using transient transfection and purified as described above, and OA-5D5 was expressed using stable transfection and purified as described above. All molecules were analyzed via size exclusion chromatography. Data on approximate percent monomeric character for the Protein A purified antibodies are shown below in Table 1.

TABLE A-1

| | Monomer |
|---|---|
| Antibody | percentage |
| Ab#1 | 74.2 |
| Ab#2 | 75.1 |
| Ab#3 | 74.2 |
| Ab#4 | 87.5 |
| Ab#5 | 86.5 |
| Ab#6 | 86.1 |
| Ab#7 | 87.1 |
| Ab#8 | 86.3 |
| Ab#9 | 95.1 |
| Ab#10 | 91.5 |
| Ab#11 | 90.4 |
| Ab#12 | 90.9 |
| Ab#13 | 92.2 |
| OA-5D5#1 | 78 |
| OA-5D5#2 | 75 |
| OA-5D5#3 | 24 |
| OA-5D5#4 | 89 |
| OA-5D5#5 | 98 |

### Example 5

### Binding Affinity of Antibodies to Recombinant c-Met and EpCAM

[0728] Kinetic assays to measure the association rate, dissociation rate, and binding affinity of antibodies for, e.g., the molecular targets c-Met and EpCAM may be measured using the Octet platform (ForteBio) per manufacturer's instructions. Materials required are as follows:
[0729] 96-well black flat bottom polypropylene microplates (Greiner Bio-one #655209)
[0730] Octet instrument and software (version 3.0)
[0731] Protein A sensor tips (ForteBio, #18-5010)
[0732] 1×PBS
[0733] Recombinant polyhistidine-tagged c-Met
[0734] Recombinant polyhistidine-tagged EpCAM-Fc

[0735] For Octet analysis, all reagents and samples are brought to room temperature. Protein A sensor tips (ForteBio, #18-5010) are hydrated for 10 minutes in 1×PBS. Assay steps include: 1-2 minutes of equilibration in 1×PBS, 4 minutes of antibody loading (concentration of 50 μg/ml in 1×PBS), 1-2 minutes of baseline stabilization, 4 minutes of antibody:antigen association, and 4 minutes of antibody:antigen dissociation. 1×PBS is used as the matrix throughout. Data are analyzed with Octet Data Analysis software, processed, and fit to a 1:1 binding model to determine kinetic parameters (K_{d}, kₒₙ and k_{diss}).

[0736] Table A-2 describes approximate EpCAM binding affinity and dissociation rate as determined for Ab#1, Ab#2, Ab#3, Ab#4, Ab#5, Ab#6, Ab#7, Ab#8, Ab#9, Ab#10, Ab#11, Ab#12, and Ab#13.

[0737] Table A-3 describes a repeat analysis for Ab#5, Ab#7, and Ab#13. For the repeat experiment, K_{d} and k_{diss} values for Ab#5, Ab#7, and Ab#13 are substantially equivalent to those determined for Ab#5, Ab#7, and Ab#13 in the initial experiment.

TABLE A-2

| Antibody | K_{d} (M) | k_{diss} (1/s) |
|---|---|---|
| Ab#1 | 1.37E−08 | 1.21E−03 |
| Ab#2 | no binding | no binding |
| Ab#3 | 1.70E−08 | 1.74E−03 |
| Ab#4 | 1.94E−08 | 1.74E−03 |
| Ab#5 | 3.57E−09 | 3.46E−04 |
| Ab#6 | 1.12E−08 | 1.22E−03 |
| Ab#7 | 2.59E−08 | 1.32E−03 |
| Ab#8 | 1.67E−08 | 9.80E−04 |
| Ab#9 | 1.00E−08 | 4.30E−04 |
| Ab#10 | 2.62E−08 | 2.11E−03 |
| Ab#11 | 4.57E−09 | 4.09E−04 |
| Ab#12 | 2.45E−08 | 1.66E−03 |
| Ab#13 | 4.98E−09 | 3.60E−04 |

TABLE A-3

| Antibody | K_{d} (M) | k_{diss} (1/s) |
|---|---|---|
| Ab#5 | 2.67E−09 | 1.94E−04 |
| Ab#7 | 1.54E−08 | 1.37E−03 |
| Ab#13 | 4.69E−09 | 3.23E−04 |

[0738] Table A-4 describes approximate c-Met binding affinity and dissociation rate as determined for Ab#5 and Ab#7.

TABLE A-4

| Antibody | K_{d} (M) | k_{diss} (1/s) |
|---|---|---|
| Ab#5 | 3.40E−09 | 5.88E−04 |
| Ab#7 | 2.81E−09 | 5.54E−04 |

### Example A-6

### Plate-Based Bispecific Antibody Binding Assay

[0739] The antibodies disclosed herein are designed to simultaneously bind both EpCAM and c-Met. A plate-based sandwich-type assay may be used to demonstrate the co-binding of the antibodies. The assay is performed as follows. Reacti-Bind 96-well plates (Pierce, catalog #15041) are coated with 50 μL of 2 μg/ml cMet-Fc (Merrimack Pharmaceuticals) in PBS, and incubated overnight at 4° C. On the next day, the plates are washed with PBS-T (PBS+0.05% Tween-20), blocked for 1 hour at room temperature with 100 μL of Protein-Free Blocking Buffer (Pierce, catalog #37572), and washed again with PBS-T. Plates are next incubated for 2 hours at room temperature with 100 μL of antibody in PBS-T+10% FBS (highest antibody concentration of 500 nM, with 10 subsequent three-fold dilutions, and one blank well for background subtraction). The plates are washed with PBS-T, and 50 μl of 1 μg/ml EpCAM-Fc-His (Merrimack Pharmaceuticals) in PBS-T is added for 1 hour at room temperature. Plates are washed with PBS-T and 50 μl of anti-His-HRP (Abcam, catalog #ab1187; 1:20,000 in PBS-T) is added and incubated (covered) for 1 hour at room temperature. Plates are again washed with PBS-T, followed by addition of 100 μl of 3,3′,5,5′-tetramethylbenzidine (TMB; Cell Signaling, catalog #7004) and incubation between 5-15 minutes at room temperature. The substrate reaction is stopped with 100 μl of Stop Solution (Cell Signaling, catalog #7002). The well absorbance is measured at 450 nm using an Envision plate reader (PerkinElmer), and the resulting data analyzed and plotted using GraphPad Prism (GraphPad Software, Inc.).

[0740] Using the above methods, OA-5D5, Ab#5, Ab#7, and Ab#13 were assessed for the ability to simultaneously bind both c-Met and EpCAM. Representative results of the assay are shown in FIG. 22. The three bispecific antibodies tested both exhibited a dose-dependent increase in absorbance, confirming ability to bind both recombinant c-Met and EpCAM, whereas monospecific control antibody showed no significant signal in the assay.

### Example A-7

### Quantitative Flow Cytometry Assessment for Cell Surface Expression of c-Met and EpCAM

[0741] For measurements of cell surface expression of, e.g., cMet and EpCAM levels, quantitative flow cytometry is performed using the Quantum Simply Cellular kit (Bangs Laboratories).

[0742] Cells are grown in exponential phase using standard cell culture media containing 10% FBS, and are passaged at least twice before the start of the experiment. On the day of the experiment, cells are visually assessed under a microscope to confirm between 60% and 80% confluence. Cells are detached from the culture plate by addition of 20 μl trypsin, and once a majority of cells are detached (as assessed visually by microscope) the trypsin is inactivated using cell culture media containing 10% FBS. The cells are centrifuged at 500 g, resuspended in flow cytometry buffer (2% FBS+0.1% sodium azide in PBS), and seeded at a density of 50,000 cells per well in a 96-well plate (BD Biosciences, catalog #62406-015).

[0743] In a separate 96-well plate, 2 drops of Quantum Simply Cellular anti-mouse IgG coated beads (Bangs Laboratories, catalog #815) or anti-human IgG coated beads (Bangs Laboratories, catalog #816) are added per well. Each bead kit contains 5 bead populations (1 blank and 4 beads with increasing levels of Fc-specific capture antibody). Each coated population binds a specific number of monoclonal antibodies of the appropriate species (the “ABC” value), and thus serves as a standard curve for quantification when beads are labeled to saturation with the same monoclonal antibody that is used to label cell surface protein.

[0744] Anti-cMet human antibody (h224G11-TH7 clone) or anti-EpCAM murine antibody (BD Biosciences, catalog #347200) conjugated with APC are added to the cells and the beads (200 nM antibody concentration in 80 μl of flow cytometry buffer). Antibody is allowed to incubate for 30 minutes at 4° C. The plates are centrifuged and washed twice with 100 μL of ice-cold flow cytometry buffer. After the last wash, the cells and beads are centrifuged and resuspended in 100 μL of ice-cold flow cytometry buffer and read using the appropriate fluorescence filter on a flow cytometer (BD FACSCanto). Channel values for the bead populations are recorded in the bead lot-specific QuickCal template provided in the Quantum Simply Cellular kit. A regression is performed that relates fluorescence signal to the beads' ABC values. ABC values are assigned to stained cell samples using this standard curve. If monovalent antibody-to-cell surface receptor binding is presumed, then the ABC value equals the number of surface receptors.

[0745] Table 5 lists EpCAM and c-Met cell surface expression levels in cell lines measured using the above protocol. U-87 MG and A549 cells have low EpCAM expression level, which NCI-H441, HCC827, and NCI-H2170 cells have high levels of EpCAM expression.

TABLE A-5

| | | | EpCAM:c-Met |
|---|---|---|---|
| Cell line | c-Met (#/cell) | EpCAM (#/cell) | ratio |
| U-87 MG | 3.2 × 10⁴ | 4.0 × 10² | 1.3 × 10⁻² |
| A549 | 7.2 × 10⁴ | 2.4 × 10⁴ | 3.3 × 10⁻¹ |
| NCI-H441 | 3.2 × 10⁵ | 2.5 × 10⁶ | 7.8 × 10⁰ |
| HCC827 | 2.1 × 10⁵ | 2.1 × 10⁶ | 1.0 × 10¹ |
| NCI- | 5.8 × 10⁴ | 3.9 × 10⁶ | 6.7 × 10¹ |
| H2170 | | | |

### Example A-8

### Assessment of Basal c-Met Pathway Activation

[0746] A) Antibody-Induced Activation of c-Met Mediated Cell Signaling

[0747] Activation of c-Met pathway signaling is an observable characteristic of bivalent antibodies against c-Met. The ability of the antibodies to activate c-Met mediated signal transduction can be assessed using a phospho-c-Met (“pMet”) enzyme-linked immunosorbent assay (ELISA), essentially as follows.

[0748] On Day 1 of the experiment, A549 cells actively growing in mid-log phase (60-80% confluence) are plated at approximately 20,000 cells per well in a 96-well plate using RPMI media containing 10% FBS and supplemented with penicillin/streptomycin and 2 mM 1-glutamine. On Day 2, the media is aspirated and replaced with low-serum RPMI media containing 0.5% FBS and supplemented with penicillin/streptomycin and 1-glutamine, and the cells incubated overnight. On Day 3, dilution series of both HGF (serving as positive control, with starting concentration of 40 nM diluted serially 3-fold) and antibodies (with starting concentration of 300 nM diluted serially 3-fold) are prepared using low-serum media. 100 μL from each dilution series concentration is then added to a plate well, and the cells are allowed to incubate at 37° C. for 10 minutes. Cells are then washed 2× with cold PBS and lysed in 50 μL per well of M-PER solution (catalog #PI78505, VWR International)+150 mM NaCl+protease and phosphatase inhibitor (cOmplete Protease Inhibitor Cocktail Tablet provided in EASY packs, catalog #4693124001, Roche Diagnostics Corp; PhosSTOP Phosphatase Inhibitor Cocktail Tablets, catalog #4906837001, Roche Diagnostics Corp). Cell lysates are stored at −80° C. within approximately 5 minutes after lysis.

[0749] For measurement of pMet signal, an ELISA kit is used (Human Phospho-HGF R/c-MET DuoSet IC Economy Pack, catalog #DYC2480E, R&D Systems). On Day 3, a 384-well High Binding Black Solid plate (Corning) is coated with capture anti-c-Met antibody at a final concentration of 4 μg per ml in 20 μl per well of PBS. The plates are left at overnight at room temperature. On Day 4, the −80° C. lysate is thawed at room temperature. The 384-well plates are blocked with 50 μL per well of a solution of 2% BSA in PBS for 1 hour at room temperature. Duplicate lysates are pooled into one well and diluted 2-fold in a solution of 2% BSA/0.1% Tween-20/25% M-PER/PBS. A standard curve of recombinant pMet is prepared by making a series of ten 2-fold serial dilutions (starting at 40 nM concentration) in 2% BSA/0.1% Tween-20/25% M-PER/PBS. Wells containing buffer only are used as control for background signal on the plate. ELISA plates are washed with a solution of 0.05% Tween-20 in PBS, and 20 μL of lysate or recombinant standard curve is transferred from the 96-well plate in duplicate to the 384-well plate. Plates are incubated at room temperature for 2 hours and washed with a solution of 0.05% Tween-20 in PBS. Next, 20 μL of primary detection antibody conjugated with horseradish peroxidase is added per well to the ELISA plates and incubated for 2 hours at room temperature. SuperSignal ELISA Pico Chemiluminescent Substrate (catalog #PI37069, VWR International) is added per manufacturer's directions and read on an Envision Plate Reader (Perkin Elmer). For data analyses, the duplicate samples are averaged and error bars are used to represent the standard deviation between the two replicates. Data are background-subtracted and regressed against the recombinant standard curve. Subsequently, Met stimulation curves and corresponding EC50 values are calculated using GraphPad Prism software (GraphPad Software, Inc.) via regression of the data to a 4-parameter logistic equation.

[0750] Using the above protocol, antibody-induced activation of Met to yield phospho-Met (pMet) was tested for a bivalent IgG. The result of this experiment is shown in FIG. 6. Treatment with HGF, as expected, produced a strong pMet signal. Bivalent IgG treatment also caused c-Met phosphorylation, to a level roughly one-half that of the native c-Met ligand HGF. In contrast, monovalent antibody OA-5D5 did not cause c-Met phosphorylation.

[0751] Ab#5, Ab#7, Ab#13, and OA-5D5 were subsequently tested in the above assay for their ability to cause c-Met phosphorylation. The results of this experiment are shown in FIG. 7. Again, treatment of HGF resulted in a strong pMet dose-response signal, while monovalent antibody OA-5D5 did not cause c-Met phosphorylation. Treatment with the bispecific antibodies did not result in c-Met phosphorylation.

[0752] B) Antibody-Induced Activation of Cell Proliferation

[0753] Antibodies targeting the c-Met receptor often have the ability to stimulate DNA synthesis and cell proliferation, which is detrimental for the development of a drug targeting human malignancies. This property can be assessed as follows.

[0754] For determination of the ability of the antibodies to induce cell proliferation, cells are first plated in a 384-well plate using 50 μl of RPMI Media 1640 (Gibco) containing 0.5% FBS. A549 cells are plated at 800 cells per well, NCI-H441 cells are plated at 2500 cells per well, and HCC827 cells are plated at 1500 cells per well. After overnight incubation of the plate, media is aspirated and replaced with 50 μl of RPMI Media 1640 containing 0.5% FBS and either 2.5 nM HGF alone as a positive control, or 500 nM of the antibody of interest. The plate is then incubated at 37° C., and cell growth monitored using an Incucyte real-time imaging system (Essen Bioscience). Images of the plate wells are recorded using phase contrast microscopy every six hours for four days, and cell confluence (reported as a percentage) calculated according to manufacturer's software. Confluence data is exported into GraphPad Prism software (GraphPad Software, Inc.) for plotting and visualization.

[0755] Using the above experimental protocol, Ab#5, Ab#7, and Ab#13 were tested in A549, NCI-H441, and HCC827 cells. Data from these experiments are plotted in FIG. 8A (A549 cells), FIG. 8B (NCI-H441 cells), and FIG. 8C(HCC827 cells). Each data point shown represents the mean confluence of cells in four replicate plate wells. For all three cell lines, HGF stimulation resulted in increased confluence of cells relative to the low serum control, corresponding to an increase in cell proliferation. In NCI-H441 and HCC827 cells, none of the tested bispecific antibodies resulted in greater cell confluence than the low serum control. In A549 cells, Ab#7 and Ab#13 showed no increase of cell confluence above the low serum control, while Ab#5 modestly increased cell confluence above the low serum control.

### Example A-9

### Assessment of Inhibition of HGF-Induced c-Met Pathway Activation

[0756] A) Antibody-Mediated Inhibition of HGF-Induced Cell Signaling

[0757] The ability of antibodies to inhibit HGF-induced, c-Met mediated signal transduction may be assessed in A549 and NCI-H2170 cells using a phospho-AKT (“pAKT”) ELISA. On Day 1 of the experiment, cells actively growing in mid-log phase (60-80% confluence) are plated at approximately 20,000 cells per well in a 96-well plate using RPMI media (+10% FBS+2 mM L-glutamine+Pen/Strep). On Day 2, the media is aspirated and replaced with low-serum RPMI media (+0.5% FBS+L-glutamine+Pen/Strep), and the cells incubated overnight. On Day 3, dilution series of antibodies (with starting concentration of 300 nM diluted serially 3-fold) are prepared using low-serum media. 100 μL from each dilution series concentration is then added to a plate well, and the cells are allowed to incubate at 37° C. for 2 hours. Next, the antibody containing media is aspirated and replaced with 100 μL of antibody containing media additionally containing 1 nM HGF. The cells are allowed to incubate with the HGF containing media at 37° C. for 10 minutes. Cells are then washed 2× with cold PBS and lysed in 50 μL per well of M-PER solution (catalog #PI78505, VWR International)+150 mM NaCl+protease and phosphatase inhibitor (cOmplete Protease Inhibitor Cocktail Tablet provided in EASY packs, catalog #4693124001, Roche Diagnostics Corp; PhosSTOP Phosphatase Inhibitor Cocktail Tablets, catalog #4906837001, Roche Diagnostics Corp). Cell lysates are stored at −80° C. within approximately 5 minutes after lysis.

[0758] For measurement of pAKT signal, an ELISA assay was used. A 384-well High Binding Black Solid plate (Corning) is coated with capture anti-AKT antibody (Millipore, catalog #05-591M) at a final concentration of 4 μg per ml in 20 μl per well of PBS. The plates are left at overnight at room temperature. On Day 4, the −80° C. lysate is thawed at room temperature. The 384-well plates are blocked with 50 μL per well of a solution of 2% BSA in PBS for 1 hour at room temperature. Duplicate lysates are pooled into one well and diluted 2-fold in a solution of 2% BSA/0.1% Tween-20/25% M-PER/PBS. A standard curve of recombinant pAKT (Millipore, catalog #14-276) is prepared by making a series of ten 2-fold serial dilutions (starting at 60 nM concentration) in 2% BSA/0.1% Tween-20/25% M-PER/PBS. Wells containing buffer only are used as control for background signal on the plate. ELISA plates are washed with a solution of 0.05% Tween-20 in PBS, and 20 μL of lysate or recombinant standard curve is transferred from the 96-well plate in duplicate to the 384-well plate. Plates are incubated at room temperature for 2 hours and washed with a solution of 0.05% Tween-20 in PBS. Next, 20 μL of 1:1000 diluted biotinylated secondary antibody (Cell Signaling Technology, catalog #5102) is added per well to the ELISA plates and incubated for 1 hr at room temperature. ELISA plates are then washed with a solution of 0.05% Tween-20 in PBS. 20 μL of diluted streptavidin conjugated with HRP (R&D Systems, catalog #DY998) is added to the ELISA plates and incubated for 30 minutes at room temperature. SuperSignal ELISA Pico Chemiluminescent Substrate (catalog #PI37069, VWR International) is added per manufacturer's directions and read on an Envision Plate Reader (Perkin Elmer). For data analyses, the duplicate samples are averaged and error bars are used to represent the standard deviation between the two replicates. Data are background-subtracted and regressed against the recombinant standard curve. Subsequently, pAKT inhibition curves and corresponding IC₅₀ values are calculated using GraphPad Prism software (GraphPad Software, Inc.) via regression of the data to a 4 parameter logistic equation.

[0759] Using the above protocol, the ability of Ab#5, Ab#7, Ab#13, and OA-5D5 to inhibit HGF stimulated pAKT was tested in both A549 and NCI-H2170 cells. Typical results of these experiments are shown in FIG. 9. In the A549 cells, which have low EpCAM expression, Ab#5, Ab#7, and Ab#13 had substantially equivalent inhibition potency relative to OA-5D5. In the NCI-H2170 cells, which have high EpCAM expression, Ab#5, Ab#7, and Ab#13 exhibited approximately a 10-fold to 20-fold improvement in pAKT IC50 relative to OA-5D5.

[0760] B) Antibody-Mediated Inhibition of HGF-Induced Cell Proliferation

[0761] The ability of antibodies to inhibit HGF-induced, c-Met mediated cell proliferation may be assessed, for example, in U-87 MG, A549, and NCI-H441 cells as follows.

[0762] For determination of the ability of the antibodies to inhibit HGF-induced, c-Met mediated cell proliferation, cells are first plated in a 384-well plate using 50 μl of RPMI Media 1640 (Gibco) containing 0.5% FBS. A549 cells are plated at 800 cells per well, U-87 MG cells are plated at 1500 cells per well, and NCI-H441 cells are plated at 3000 cells per well.

[0763] For A549 and NCI-H441 cells, after overnight incubation of the plate, media is aspirated and replaced with 50 μl of RPMI Media 1640 containing 0.5% FBS only (negative control), 0.5% FBS plus 0.625 nM HGF (positive control), or 0.5% FBS plus 0.625 nM HGF and 500 nM of the antibody of interest.

[0764] For U-87 MG cells, which secrete autocrine HGF, after overnight incubation of the plate, media is aspirated and replaced with 50 μl of RPMI Media 1640 containing either 0.5% FBS only (negative control) or 0.5% FBS plus 500 nM of the antibody of interest.

[0765] The plate is then incubated at 37° C., and cell growth monitored using an Incucyte real-time imaging system (Essen Bioscience). Images of the plate wells are recorded using phase contrast microscopy every six hours for four days, and cell confluence (reported as a percentage) calculated according to manufacturer's software. Confluence data is exported into GraphPad Prism software (GraphPad Software, Inc.) for plotting and visualization.

[0766] Using the above experimental protocol, Ab#5 and OA-5D5 were tested using U-87 MG and NCI-H441 cells. Results from a representative experiment are plotted in FIG. 10. Each data point shown represents the mean confluence of cells in four replicate plate wells. In the U-87 MG cells, which have low EpCAM expression, both Ab#5 and OA-5D5 were substantially equivalently able to decrease cell confluence. In the NCI-H441 cells, which have high EpCAM expression, Ab#5 but not OA-5D5 exhibited an ability to decrease HGF-induced cell confluence below basal 0.5% serum conditions.

[0767] Using the above experimental protocol, Ab#7 and OA-5D5 were tested using A549 and NCI-H441 cells. Results from a representative experiment are plotted in FIG. 11. Each data point shown represents the mean confluence of cells in four replicate plate wells. In the A549 cells, which have low EpCAM expression, both Ab#7 and OA-5D5 were able to inhibit HGF-induced cell confluence to the level of the 0.5% serum control. In the NCI-H441 cells, which have high EpCAM expression, Ab#5 decreased cell confluence nearly to the basal 0.5% serum control, while OA-5D5 showed a decreased ability to inhibit cell confluence.

### Example A-10

### Assessment of Antibody-Induced c-Met Degradation

[0768] To assess the ability of antibodies to induce degradation of c-Met receptor, 7,000 A549 or 15,000 NCI-H2170 cells are plated into a 96-well flat bottom plate using RPMI media containing 10% FBS and supplemented with penicillin/streptomycin and 1-glutamine. The following day, media is replaced with 100 μl of low-serum RPMI 1640 media (Gibco) containing 0.5% FBS supplemented with penicillin/streptomycin and 1-glutamine. After overnight incubation, the low-serum media is aspirated and replaced with low-serum media additionally containing the antibody of interest. Cells are incubated at 37° C., 5% CO2 for 24 hours. Upon the completion of the 24 hour incubation, the cells are washed with PBS twice and then lysed with M-PER (mammalian protein extraction reagent; Pierce, catalog #78505) containing protease and phosphatase inhibitors (cOmplete, Mini, EDTA-free Protease Inhibitor Cocktail Tablet provided in EASY packs, catalog #04693159001, Roche Diagnostics Corp; PhosSTOP Phosphatase Inhibitor Cocktail Tablets, catalog #4906837001, Roche Diagnostics Corp).

[0769] Cell lysates are evaluated in duplicate by a total c-Met ELISA (Invitrogen, catalog #KH00251) according to the manufacturer's instructions. Signal was detected using an Envision Plate Reader (Perkin Elmer). For each cell line, the total c-Met expression was normalized to the amount detected in a no inhibitor media control to allow for comparison across cell lines.

[0770] Using the above method, OA-5D5 and Ab#5 were tested for the ability to degrade c-Met receptor in A549 and H2170 cells. The resulting data is shown in FIG. 12. In the low EpCAM A549 cells, neither OA-5D5 nor Ab#5 induced more than 20% c-Met degradation. In the high EpCAM NCI-H2170 cells, OA-5D5 reduced c-Met expression by approximately 30%, while Ab#5 reduced c-Met expression by approximately 65%.

### Example A-11

### Pharmacokinetic Properties of Antibodies in Mice

[0771] To determine the terminal elimination half-life of the antibodies, Nu/Nu mice (Charles River Laboratories) are dosed by intravenous bolus with antibody, and bleeds taken at 0.25, 1, 4, 8, 24, 48, 72, 96, 144, 192, 240, and 288 hours. Three mice are bled per time point (using either saphenous vein or terminal bled) and the serum collected (between 10-200 μl) from individual animals. For serum sample analysis, Reacti-Bind 96-well plates (Pierce) are coated with 50 μl of 1 μg/ml of goat anti-Fc antibody (Abcam, catalog #ab98616) in PBS and incubated overnight at 4° C. On the next day, plates are washed with PBS-T (PBS+0.05% Tween-20), blocked for 1 hour at room temperature with 100 μl of Protein-Free Blocking Buffer (Pierce, catalog #37572), and washed again with PBS-T. The plates are then incubated for 2 hours at room temperature with 100 μL of samples and standard curves. For the standard curves, antibodies of interest are diluted to an initial concentration of 12 μg/ml in PBS-T with 10 additional 3-fold dilutions and a final well blank. Serum samples are diluted at 1:50 in PBS-T with 10 additional 3-fold dilutions and a final well blank. The plates are washed with PBS-T, and 100 μl of anti-Fc-HRP antibody (Abcam, catalog #ab99759; 1:20,000 in PBS-T) is added and incubated (covered) for 1 hour at room temperature. Plates are again washed with PBS-T, followed by addition of 100 μl of 3,3′,5,5′-tetramethylbenzidine (TMB; Cell Signaling, catalog #7004) and incubation between 5-15 minutes at room temperature. The substrate reaction is stopped with 100 μl of Stop Solution (Cell Signaling, catalog #7002). The well absorbance is measured at 450 nm using an Envision plate reader (PerkinElmer), and the back-calculated values generated using SoftMax Pro.

[0772] Pharmacokinetic curve fitting is performed in MATLAB (The Mathworks) using non-linear regression analysis of a two-compartment biexponential model:

Concentration=Ae^{-αt}+Be^{-βt}

[0773] For the non-linear regression, data is assumed to follow a proportional error model, and thus for the regression the model and data are weighted using the inverse of data magnitude. Terminal elimination half-life is calculated as follows:

$${t}_{\frac{1}{2} , el} = \frac{ln ( 2 )}{β }$$

[0774] Ab#5, Ab#7, and Ab#13 were evaluated using the above methods, and the resulting mean and standard deviation (6 data points for each timepoint representing 3 mice and 2 well replicates per mouse) are plotted in FIG. 13A (Ab#5), FIG. 13B (Ab#7), and FIG. 13C (Ab#13). Model fits to the data are shown as a solid line. Terminal half-life data is given below in Table 6.

TABLE A-6

| | Dose | Terminal elimination |
|---|---|---|
| Antibody | (mg/kg) | half-life (hr) |
| Ab#5 | 30 | 60 |
| Ab#7 | 30 | 121 |
| Ab#13 | 30 | 64 |

### Example A-12

### Evaluation of Antibody Activity on U-87 MG Tumors Implanted into Nude Mice

[0775] The in vivo activity of Ab#7 and OA-5D5 is evaluated as follows. Six-to-seven-week-old female Nu/Nu mice (Charles River Laboratories) are injected subcutaneously with 5×10⁶ U-87 MG cells/mouse (ATCC) using an injection volume of 200 μl PBS. Seven days post-injection, initial tumor volumes are measured using the following formula: (π/6)*L*W². Mice are segregated into groups of 10, and subsequently treated with PBS control, bispecific antibody, or OA-5D5 by intraperitoneal injection every 3 days. The doses of the bispecific antibody correspond to approximately 30 mg/kg based on body weight, while the doses of OA-5D5 dosing were approximately 24 mg/kg (an equal molar level). Tumor measurements are determined twice weekly throughout the study. Plotted data of tumor size represents mean and standard error of the mean for each measurement.

[0776] Data from a representative experiment using the above protocol are shown in FIG. 31. Both Ab#7 and OA-5D5 were able to regress subcutaneously implanted U-87 MG tumors to a similar extent.

### Example A-13

### Sequence Information for Additional Embodiments

```
Amino Acid (aa) and Nucleotide (nt) sequences
Underline: CDRs
Bold sequence: Stabilization mutations
>anti-c-Met-LC aa (Light Chain for SEQ ID NOs: 403-415)
(SEQ ID NO: 400)
DIQMTQSPSSVSASVGDRVTITCRASQGISSWLAWYQQKPGKAPKLLIYAASSLQSGVPSRFSGSGSGTDFTLT
ISS
                                                          CDR1 CDR2
LQPEDFATYYCLQANSFPPTFGGGTKVEIKRTVAAPSVFIFPPSDEQLKSGTASVVCLLNNFYPREAKVQWKVD
NAL
                          CDR3
QSGNSQESVTEQDSKDSTYSLSSTLTLSKADYEKHKVYACEVTHQGLSSPVTKSFNRGEC**
>RESERVED SEQUENCE
(SEQ ID NO: 401)
XXXX
>anti-c-Met-LC nt (Light Chain for SEQ ID NOs: 403-415)
(SEQ ID NO: 402)
gacattcagatgacccagtctccttcaagcgtcagcgcttccgtgggcgaccgggtcaccatcacatgcagagc
ctcccaggggattagctcctggctggcttggtatcagcagaagcctgggaaagcaccaaagctgctgatctatg
ccgcttctagtctgcagtccggagtgccctctcgattctctggcagtgggtcaggaaccgactttactctgacc
atttcaagcctgcagcctgaggatttcgctacatactattgcctgcaggcaaactctttcccccctacctttgg
cgggggaacaaaagtggagatcaagcgtacggtggcagccccatccgtcttcatttttccaccctctgacgaac
agctgaaaagtggcacagccagcgtggtctgtctgctgaacaatttttacccccgcgaagccaaagtgcagtgg
aaggtcgataacgctctgcagagcgggaattcccaggagtctgtgactgaacaggacagtaaagattcaaccta
tagcctgtcctctacactgactctgagcaaggcagattacgagaagcacaaagtgtatgcctgcgaagtcacac
atcagggactgagttcacctgtgactaagagcttcaatagaggcgagtgttgataa
>Ab#1-HC-aa
(SEQ ID NO: 403)
QLQLQESGPGLVKPSETLSLTCTVSGGSISSSVYYWSWIRQPPGKGLEWIGVIYPSGNTYYSPSLKSRVTISVD
TSKNQFSLKLSSVTAADTAVYYCARTIYDLFDIWGQGTMVTVSSASTKGPSVFPLAPSSKSTSGGTAALGCLVK
DYFPEPVTVSWNSGALTSGVHTFPAVLQSSGLYSLSSVVTVPSSSLGTQTYICNVNHKPSNTKVDKKVEPKSCD
KTHTCPSCPAPEFLGGPSVFLFPPKPKDTLMISRTPEVTCVVVDVSQEDPEVQFNWYVDGVEVHNAKTKPREEQ
FNSKYRVVSVLTVLHQDWLNGKEYKCKVSNKGLPSSIEKTISKAKGQPREPQVYTLPPSREEMTKNQVSLSCAV
KGFYPSDIAVEWESNGQPENNYKTTPPVLDSDGSFFLVSKLTVDKSRWQQGNVFSCSVMHEALHNHYTQKSLSL
SKSCDKTGGGGSGGGGSGGGGSGGGGSGGGGSGGGGSGGGGSGGGGSCPSCPAPEFLGGPSVFLFPPKPKDTLM
ISRTPEVTCVVVDVSQEDPEVQFNWYVDGVEVHNAKTKPREEQFNSDYRVVSVLTVLHQDWLNGKEYKCKVSNK
GLPSSIEKTISKAKGQPREPQVYTLPPSREEMTKNQVSLWCLVKGFYPSDIAVEWESNGQPENNYKTTPPVLDS
DGSFFLYSKLTVDKSRWQQGNVFSCSVMHEALHNHYTQKSLSLSGECGGGGSGGGGS
DIVMTQSPLSLPVTPGEPASISCRSTKSLLHSNGITYLYWYLQKPGQSPQLLIYQMSNLASGVPDRFSSSGSGT
DFTLKISRVEAEDEGVYYCAQNLEIPRTFGGGTKLEIKRTGGGGSGGGGSGGGGSGGGGSQVQLVQSGAEVKKP
GESVKISCKASGYTFTNYGMNWVRQAPGQGLKWMGWINTYTGESTYADDFKGRFAFSLDTSASTAYLQLSSLRS
EDTAVYFCARFAIKGDYWGQGTLVTVSS**
>Ab#2-HC-aa
(SEQ ID NO: 404)
QLQLQESGPGLVKPSETLSLTCTVSGGSISSSVYYWSWIRQPPGKGLEWIGVIYPSGNTYYSPSLKSRVTISVD
TSKNQFSLKLSSVTAADTAVYYCARTIYDLFDIWGQGTMVTVSSASTKGPSVFPLAPSSKSTSGGTAALGCLVK
DYFPEPVTVSWNSGALTSGVHTFPAVLQSSGLYSLSSVVTVPSSSLGTQTYICNVNHKPSNTKVDKKVEPKSCD
KTHTCPSCPAPEFLGGPSVFLFPPKPKDTLMISRTPEVTCVVVDVSQEDPEVQFNWYVDGVEVHNAKTKPREEQ
FNSKYRVVSVLTVLHQDWLNGKEYKCKVSNKGLPSSIEKTISKAKGQPREPQVYTLPPSREEMTKNQVSLSCAV
KGFYPSDIAVEWESNGQPENNYKTTPPVLDSDGSFFLVSKLTVDKSRWQQGNVFSCSVMHEALHNHYTQKSLSL
SKSCDKTGGGGSGGGGSGGGGSGGGGSGGGGSGGGGSGGGGSGGGGSCPSCPAPEFLGGPSVFLFPPKPKDTLM
ISRTPEVTCVVVDVSQEDPEVQFNWYVDGVEVHNAKTKPREEQFNSDYRVVSVLTVLHQDWLNGKEYKCKVSNK
GLPSSIEKTISKAKGQPREPQVYTLPPSREEMTKNQVSLWCLVKGFYPSDIAVEWESNGQPENNYKTTPPVLDS
DGSFFLYSKLTVDKSRWQQGNVFSCSVMHEALHNHYTQKSLSLSGECGGGGSGGGGS
QVQLVQSGSELKKPGESVKVSCKASGYTFTNYGMHWVRQAPGQGLKWMGWINTYTGESTYADDFKGRFAFSLDT
SASTAYLQISSLKAEDTAVYFCARFAIKGDYWGQGTLVTVSSASTGGGGSGGGGSGGGGSGGGGSDIVMTQSPL
SLPVTPGEPASISCRSTKSLLHSDGITYLYWYLQKPGQSPQLLIYQLSNLASGVPDRFSSSGSGTDFTLKISRV
EAEDEGVYYCAQNLEIPYTFGQGTKVEIK**
>Ab#3-HC-aa
(SEQ ID NO: 405)
QLQLQESGPGLVKPSETLSLTCTVSGGSISSSVYYWSWIRQPPGKGLEWIGVIYPSGNTYYSPSLKSRVTISVD
TSKNQFSLKLSSVTAADTAVYYCARTIYDLFDIWGQGTMVTVSSASTKGPSVFPLAPSSKSTSGGTAALGCLVK
DYFPEPVTVSWNSGALTSGVHTFPAVLQSSGLYSLSSVVTVPSSSLGTQTYICNVNHKPSNTKVDKKVEPKSCD
KTHTCPSCPAPEFLGGPSVFLFPPKPKDTLMISRTPEVTCVVVDVSQEDPEVQFNWYVDGVEVHNAKTKPREEQ
FNSKYRVVSVLTVLHQDWLNGKEYKCKVSNKGLPSSIEKTISKAKGQPREPQVYTLPPSREEMTKNQVSLSCAV
KGFYPSDIAVEWESNGQPENNYKTTPPVLDSDGSFFLVSKLTVDKSRWQQGNVFSCSVMHEALHNHYTQKSLSL
SKSCDKTGGGGSGGGGSGGGGSGGGGSGGGGSGGGGSGGGGSGGGGSCPSCPAPEFLGGPSVFLFPPKPKDTLM
ISRTPEVTCVVVDVSQEDPEVQFNWYVDGVEVHNAKTKPREEQFNSDYRVVSVLTVLHQDWLNGKEYKCKVSNK
GLPSSIEKTISKAKGQPREPQVYTLPPSREEMTKNQVSLWCLVKGFYPSDIAVEWESNGQPENNYKTTPPVLDS
DGSFFLYSKLTVDKSRWQQGNVFSCSVMHEALHNHYTQKSLSLSGECGGGGSGGGGS
QVQLVQSGSELKKPGESVKVSCKASGYTFTNYGMNWVRQAPGQGLKWMGWINTYTGESTYADDFKGRFAFSLDT
SASTAYLQISSLKAEDTAVYFCARFAIKGDYWGQGTLVTVSSASTGGGGSGGGGSGGGGSGGGGSDIVMTQSPL
SLPVTPGEPASISCRSTKSLLHSDGITYLYWYLQKPGQSPQLLIYQLSNLASGVPDRFSSSGSGTDFTLKISRV
EAEDEGVYYCAQNLEIPRTFGQGTKVEIK**
>Ab#4-HC-aa
(SEQ ID NO: 406)
QLQLQESGPGLVKPSETLSLTCTVSGGSISSSVYYWSWIRQPPGKGLEWIGVIYPSGNTYYSPSLKSRVTISVD
TSKNQFSLKLSSVTAADTAVYYCARTIYDLFDIWGQGTMVTVSSASTKGPSVFPLAPSSKSTSGGTAALGCLVK
DYFPEPVTVSWNSGALTSGVHTFPAVLQSSGLYSLSSVVTVPSSSLGTQTYICNVNHKPSNTKVDKKVEPKSCD
KTHTCPSCPAPEFLGGPSVFLFPPKPKDTLMISRTPEVTCVVVDVSQEDPEVQFNWYVDGVEVHNAKTKPREEQ
FNSKYRVVSVLTVLHQDWLNGKEYKCKVSNKGLPSSIEKTISKAKGQPREPQVYTLPPSREEMTKNQVSLSCAV
KGFYPSDIAVEWESNGQPENNYKTTPPVLDSDGSFFLVSKLTVDKSRWQQGNVFSCSVMHEALHNHYTQKSLSL
SKSCDKTGGGGSGGGGSGGGGSGGGGSGGGGSGGGGSGGGGSGGGGSCPSCPAPEFLGGPSVFLFPPKPKDTLM
ISRTPEVTCVVVDVSQEDPEVQFNWYVDGVEVHNAKTKPREEQFNSDYRVVSVLTVLHQDWLNGKEYKCKVSNK
GLPSSIEKTISKAKGQPREPQVYTLPPSREEMTKNQVSLWCLVKGFYPSDIAVEWESNGQPENNYKTTPPVLDS
DGSFFLYSKLTVDKSRWQQGNVFSCSVMHEALHNHYTQKSLSLSGECGGGGSGGGGS
DIVMTQSPLSLPVTPGEPASISCRSTKSLLHSDGITYLYWYLQKPGQSPQLLIYQLSNLASGVPDRFSSSGSGT
DFTLKISRVEAEDEGVYYCAQNLEIPRTFGQGTKVEIKRTGGGGSGGGGSGGGGSGGGGSGQVQLVQSGSELKK
PGESVKVSCKASGYTFTNYGMNWVRQAPGQGLKWMGWINTYTGESTYADDFKGRFAFSLDTSASTAYLQISSLK
AEDTAVYFCARFAIKGDYWGQGTLVTVSS**
>Ab#5-HC-aa
(SEQ ID NO: 407)
QLQLQESGPGLVKPSETLSLTCTVSGGSISSSVYYWSWIRQPPGKGLEWIGVIYPSGNTYYSPSLKSRVTISVD
TSK
                                                              CDR1 CDR2
NQFSLKLSSVTAADTAVYYCARTIYDLFDIWGQGTMVTVSSASTKGPSVFPLAPSSKSTSGGTAALGCLVKDYF
PEP
                                                  CDR3
VTVSWNSGALTSGVHTFPAVLQSSGLYSLSSVVTVPSSSLGTQTYICNVNHKPSNTKVDKKVEPKSCDKTHTCP
SCPAPEFLGGPSVFLFPPKPKDTLMISRTPEVTCVVVDVSQEDPEVQFNWYVDGVEVHNAKTKPREEQFNSKYR
VVSVLTVLHQDWLNGKEYKCKVSNKGLPSSIEKTISKAKGQPREPQVYTLPPSREEMTKNQVSLSCAVKGFYPS
DIAVEWESNGQPENNYKTTPPVLDSDGSFFLVSKLTVDKSRWQQGNVFSCSVMHEALHNHYTQKSLSLSKSCDK
TGGGGSGGGGSGGGGSGGGGSGGGGSGGGGSGGGGSGGGGSCPSCPAPEFLGGPSVFLFPPKPKDTLMISRTPE
VTCVVVDVSQEDPEVQFNWYVDGVEVHNAKTKPREEQFNSDYRVVSVLTVLHQDWLNGKEYKCKVSNKGLPSSI
EKTISKAKGQPREPQVYTLPPSREEMTKNQVSLWCLVKGFYPSDIAVEWESNGQPENNYKTTPPVLDSDGSFFL
YSKLTVDKSRWQQGNVFSCSVMHEALHNHYTQKSLSLSGECGGGGSGGGGSDIVMTQSPLSLPVTPGEPASISC
RSTKSLLHSNGITYLYWYLQKPGQ
                                                                                                                        CDR4
SPQLLIYQMSNLASGVPDRFSSSGSGTDFTLKISRVEAEDEGVYYCAQNLEIPRTFGGGTKLEIKRTGGGGSGG
GGS
                  CDR5 CDR6
GGGGSGGGGSQVQLVQSGAEVKKPGESVKISCKASGYTFTNYGMNWVRQAPGQGLKWMGWINTYTGESTYADDF
KGR
                                                                              CDR7 CDR8
FAFSLDTSASTAYLQLSSLRSEDTAVYFCARFAIKGDYWGQGTLVTVSS**
                                                                    CDR9
>Ab#5-HC-nt
(SEQ ID NO: 408)
cagctgcagctgcaggagagcggacccggactggtcaagccctccgagacactgtctctgacctgcacagtgtc
aggcgggagcatcagctcctctgtctactattggtcttggattcggcagccccctggaaagggcctggaatgga
tcggcgtgatctacccaagtgggaacacttactattctcccagtctgaaatccagagtgaccatcagtgtcgac
acatcaaagaatcagttcagcctgaaactgagttcagtgacagccgctgatactgcagtctactattgtgccag
gaccatctatgacctgtttgatatttgggggcagggaactatggtgaccgtcagctccgctagcactaagggac
cttccgtgttcccactggccccctcaagcaaatctaccagtgggggaacagcagccctgggctgtctggtgaag
gattactttccagagcccgtgaccgtcagttggaactcaggggctctgactagcggagtgcacaccttccccgc
agtcctgcagtcctctgggctgtactccctgagttcagtggtcactgtgcccagctcctctctgggaacacaga
cttatatctgcaacgtgaatcacaagccttccaataccaaagtcgacaagaaagtcgagcctaagtcatgtgat
aaaacccatacatgcccaagctgtcctgcaccagaatttctgggaggaccaagcgtgttcctgtttccacctaa
gcctaaagacaccctgatgattagtcgcactccagaggtgacctgtgtggtcgtggacgtcagccaggaggatc
ccgaagtgcagtttaactggtacgtcgatggcgtggaagtccacaatgctaagacaaaaccaagagaggaacag
ttcaacagcaagtacagggtcgtgtccgtgctgactgtcctgcatcaggactggctgaacggaaaagagtataa
gtgcaaagtgagcaataagggcctgcccagttcaatcgagaaaacaatttccaaggcaaaaggccagcctcggg
aaccacaggtgtataccctgccacccagcagagaggaaatgacaaagaaccaggtgtcactgagctgtgccgtc
aaaggcttttaccctagcgatatcgctgtggagtgggaatccaatgggcagccagaaaacaattataagaccac
acctccagtgctggacagcgatggatccttctttctggtgtccaagctgaccgtggacaaatctcggtggcagc
agggcaacgtgttctcctgctctgtcatgcatgaggccctgcacaatcattacacccagaaaagtctgtcactg
agcaagtcctgtgataaaacaggaggcgggggatctggcgggggaggcagtgggggaggcgggtccggaggagg
aggaagcggaggaggaggatccggaggaggcgggtctggaggcgggggaagtggaggaggaggatcttgcccaa
gttgtccagcacctgagttcctgggaggaccatccgtgttcctgtttccccctaagcccaaagacaccctgatg
atcagccggacacctgaagtgacttgcgtcgtggtggacgtgtcccaggaggatccagaggtccagtttaactg
gtatgtcgatggcgtggaggtccacaatgctaagaccaaacctcgcgaggaacagttcaactctgactaccgag
tggtcagtgtgctgacagtcctgcatcaggattggctgaacgggaaggaatacaaatgtaaagtgagcaataag
ggactgccaagctccatcgagaagaccatcagcaaagccaaaggccagcccagggaacctcaggtgtacactct
gccaccctcccgcgaggaaatgaccaagaaccaggtgtctctgtggtgtctggtcaaaggattttatccctctg
acatcgccgtggagtgggaaagtaatggccagcctgaaaacaattacaagactacccctccagtgctggactca
gatgggagcttctttctgtatagtaagctgaccgtggataaatcacggtggcagcagggaaatgtgttctcttg
cagtgtcatgcacgaggccctgcataaccattacacacagaagtcattaagcttatcgggggaatgtggaggcg
gagggagcggcggaggcggcagcgatatcgtgatgacacagtcacccctgtcgctccctgtgactcccggagag
cctgcgtccatctcgtgccggtcaacaaagtccctgctgcacagcaatggaattacgtatttgtactggtattt
gcaaaaacccggacagagcccgcaattgttgatctaccagatgtcaaaccttgcgagcggggtcccggatcgct
ttagctcgtcggggtcaggaactgacttcacactcaaaatctcaagggtcgaggccgaggatgaaggtgtctat
tactgcgctcagaatctcgaaatcccgcggacctttggtggaggtacgaagctggagatcaagcgaacgggagg
cggtgggtccggtggcggtggttccggcggaggtggttcgggaggaggaggtagccaggtgcagcttgtccagt
cgggagcagaggtaaagaagccaggagagtcggtgaaaatctcgtgtaaagcctcggggtacacattcacgaac
tacggcatgaattgggtgagacaagctcccgggcagggcttgaaatggatgggatggattaacacctacacagg
ggaatccacatatgcggacgacttcaaggggaggttcgcgttttcacttgatacttcagcgagcacggcgtatc
tccaactctcgtcgcttcgctccgaagataccgcagtatacttttgcgccagattcgcgattaaaggggactat
tggggacaggggacccttgtcacggtgtcatcatgataa
>Ab#6-HC-aa
(SEQ ID NO: 409)
QLQLQESGPGLVKPSETLSLTCTVSGGSISSSVYYWSWIRQPPGKGLEWIGVIYPSGNTYYSPSLKSRVTISVD
TSKNQFSLKLSSVTAADTAVYYCARTIYDLFDIWGQGTMVTVSSASTKGPSVFPLAPSSKSTSGGTAALGCLVK
DYFPEPVTVSWNSGALTSGVHTFPAVLQSSGLYSLSSVVTVPSSSLGTQTYICNVNHKPSNTKVDKKVEPKSCD
KTHTCPSCPAPEFLGGPSVFLFPPKPKDTLMISRTPEVTCVVVDVSQEDPEVQFNWYVDGVEVHNAKTKPREEQ
FNSKYRVVSVLTVLHQDWLNGKEYKCKVSNKGLPSSIEKTISKAKGQPREPQVYTLPPSREEMTKNQVSLSCAV
KGFYPSDIAVEWESNGQPENNYKTTPPVLDSDGSFFLVSKLTVDKSRWQQGNVFSCSVMHEALHNHYTQKSLSL
SKSCDKTGGGGSGGGGSGGGGSGGGGSGGGGSGGGGSGGGGSGGGGSCPSCPAPEFLGGPSVFLFPPKPKDTLM
ISRTPEVTCVVVDVSQEDPEVQFNWYVDGVEVHNAKTKPREEQFNSDYRVVSVLTVLHQDWLNGKEYKCKVSNK
GLPSSIEKTISKAKGQPREPQVYTLPPSREEMTKNQVSLWCLVKGFYPSDIAVEWESNGQPENNYKTTPPVLDS
DGSFFLYSKLTVDKSRWQQGNVFSCSVMHEALHNHYTQKSLSLSGECGGGGSGGGGS
DIVMTQSPLSLPVTPGEPASISCRSTKSLLHSDGITYLYWYLQKPGQSPQLLIYQLSNLASGVPDRFSSSGSGT
DFTLKISRVEAEDEGVYYCAQNLEIPRTFGGGTKLEIKRTGGGGSGGGGSGGGGSGGGGSQVQLVQSGAEVKKP
GESVKISCKASGYTFTNYGMNWVRQAPGQGLKWMGWINTYTGESTYADDFKGRFAFSLDTSASTAYLQLSSLRS
EDTAVYFCARFAIKGDYWGQGTLVTVSS**
>Ab#7-HC-aa
(SEQ ID NO: 410)
QLQLQESGPGLVKPSETLSLTCTVSGGSISSSVYYWSWIRQPPGKGLEWIGVIYPSGNTYYSPSLKSRVTISVD
TSKNQFSLKLSSVTAADTAVYYCARTIYDLFDIWGQGTMVTVSSASTKGPSVFPLAPSSKSTSGGTAALGCLVK
DYFPEPVTVSWNSGALTSGVHTFPAVLQSSGLYSLSSVVTVPSSSLGTQTYICNVNHKPSNTKVDKKVEPKSCD
KTHTCPSCPAPEFLGGPSVFLFPPKPKDTLMISRTPEVTCVVVDVSQEDPEVQFNWYVDGVEVHNAKTKPREEQ
FNSKYRVVSVLTVLHQDWLNGKEYKCKVSNKGLPSSIEKTISKAKGQPREPQVYTLPPSREEMTKNQVSLSCAV
KGFYPSDIAVEWESNGQPENNYKTTPPVLDSDGSFFLVSKLTVDKSRWQQGNVFSCSVMHEALHNHYTQKSLSL
SKSCDKTGGGGSGGGGSGGGGSGGGGSGGGGSGGGGSGGGGSGGGGSCPSCPAPEFLGGPSVFLFPPKPKDTLM
ISRTPEVTCVVVDVSQEDPEVQFNWYVDGVEVHNAKTKPREEQFNSDYRVVSVLTVLHQDWLNGKEYKCKVSNK
GLPSSIEKTISKAKGQPREPQVYTLPPSREEMTKNQVSLWCLVKGFYPSDIAVEWESNGQPENNYKTTPPVLDS
DGSFFLYSKLTVDKSRWQQGNVFSCSVMHEALHNHYTQKSLSLSGECGGGGSGGGGSDIVMTQSPLSLPVTPGE
PASISCRSTKSLLHSDGITYLYWYLQKPGQSPQLLIYQLSN
LASGVPDRFSSSGSGTDFTLKISRVEAEDEGVYYCAQNLEIPRTFGCGTKLEIKRTGGGGSGGGGSGGGGS
GGGGSQVQLVQSGAEVKKPGESVKISCKASGYTFTNYGMNWVRQAPGQCLKWMGWINTYTGESTYADDFKG
RFAFSLDTSASTAYLQLSSLRSEDTAVYFCARFAIKGDYWGQGTLVTVSS**
>Ab#7-HC-nt
(SEQ ID NO: 411)
cagctgcagctgcaggagagcggacccggactggtcaagccctccgagacactgtctctgacctgcacagtgtc
aggcgggagcatcagctcctctgtctactattggtcttggattcggcagccccctggaaagggcctggaatgga
tcggcgtgatctacccaagtgggaacacttactattctcccagtctgaaatccagagtgaccatcagtgtcgac
acatcaaagaatcagttcagcctgaaactgagttcagtgacagccgctgatactgcagtctactattgtgccag
gaccatctatgacctgtttgatatttgggggcagggaactatggtgaccgtcagctccgctagcactaagggac
cttccgtgttcccactggccccctcaagcaaatctaccagtgggggaacagcagccctgggctgtctggtgaag
gattactttccagagcccgtgaccgtcagttggaactcaggggctctgactagcggagtgcacaccttccccgc
agtcctgcagtcctctgggctgtactccctgagttcagtggtcactgtgcccagctcctctctgggaacacaga
cttatatctgcaacgtgaatcacaagccttccaataccaaagtcgacaagaaagtcgagcctaagtcatgtgat
aaaacccatacatgcccaagctgtcctgcaccagaatttctgggaggaccaagcgtgttcctgtttccacctaa
gcctaaagacaccctgatgattagtcgcactccagaggtgacctgtgtggtcgtggacgtcagccaggaggatc
ccgaagtgcagtttaactggtacgtcgatggcgtggaagtccacaatgctaagacaaaaccaagagaggaacag
ttcaacagcaagtacagggtcgtgtccgtgctgactgtcctgcatcaggactggctgaacggaaaagagtataa
gtgcaaagtgagcaataagggcctgcccagttcaatcgagaaaacaatttccaaggcaaaaggccagcctcggg
aaccacaggtgtataccctgccacccagcagagaggaaatgacaaagaaccaggtgtcactgagctgtgccgtc
aaaggcttttaccctagcgatatcgctgtggagtgggaatccaatgggcagccagaaaacaattataagaccac
acctccagtgctggacagcgatggatccttctttctggtgtccaagctgaccgtggacaaatctcggtggcagc
agggcaacgtgttctcctgctctgtcatgcatgaggccctgcacaatcattacacccagaaaagtctgtcactg
agcaagtcctgtgataaaacaggaggcgggggatctggcgggggaggcagtgggggaggcgggtccggaggagg
aggaagcggaggaggaggatccggaggaggcgggtctggaggcgggggaagtggaggaggaggatcttgcccaa
gttgtccagcacctgagttcctgggaggaccatccgtgttcctgtttccccctaagcccaaagacaccctgatg
atcagccggacacctgaagtgacttgcgtcgtggtggacgtgtcccaggaggatccagaggtccagtttaactg
gtatgtcgatggcgtggaggtccacaatgctaagaccaaacctcgcgaggaacagttcaactctgactaccgag
tggtcagtgtgctgacagtcctgcatcaggattggctgaacgggaaggaatacaaatgtaaagtgagcaataag
ggactgccaagctccatcgagaagaccatcagcaaagccaaaggccagcccagggaacctcaggtgtacactct
gccaccctcccgcgaggaaatgaccaagaaccaggtgtctctgtggtgtctggtcaaaggattttatccctctg
acatcgccgtggagtgggaaagtaatggccagcctgaaaacaattacaagactacccctccagtgctggactca
gatgggagcttctttctgtatagtaagctgaccgtggataaatcacggtggcagcagggaaatgtgttctcttg
cagtgtcatgcacgaggccctgcataaccattacacacagaagtcattaagcttatcgggggaatgtggaggcg
gagggagcggcggaggcggcagcgatatcgtgatgacacagtcacccctgtcgctccctgtgactcccggagag
cctgcgtccatctcgtgccggtcaacaaagtccctgctgcacagcgacggaattacgtatttgtactggtattt
gcaaaaacccggacagagcccgcaattgttgatctaccagctctcaaaccttgcgagcggggtcccggatcgct
ttagctcgtcggggtcaggaactgacttcacactcaaaatctcaagggtcgaggccgaggatgaaggtgtctat
tactgcgctcagaatctcgaaatcccgcggacctttggttgcggtacgaagctggagatcaagcgaacgggagg
cggtgggtccggtggcggtggttccggcggaggtggttcgggaggaggaggtagccaggtgcagcttgtccagt
cgggagcagaggtaaagaagccaggagagtcggtgaaaatctcgtgtaaagcctcggggtacacattcacgaac
tacggcatgaattgggtgagacaagctcccgggcagtgtttgaaatggatgggatggattaacacctacacagg
ggaatccacatatgcggacgacttcaaggggaggttcgcgttttcacttgatacttcagcgagcacggcgtatc
tccaactgtcgtcgcttcgctccgaagataccgcagtatacttttgcgccagattcgcgattaaaggggactat
tggggacaggggacccttgtcacggtgtcatcatgataa
>Ab#8-HC-aa
(SEQ ID NO: 412)
QLQLQESGPGLVKPSETLSLTCTVSGGSISSSVYYWSWIRQPPGKGLEWIGVIYPSGNTYYSPSLKSRVTISVD
TSKNQFSLKLSSVTAADTAVYYCARTIYDLFDIWGQGTMVTVSSASTKGPSVFPLAPSSKSTSGGTAALGCLVK
DYFPEPVTVSWNSGALTSGVHTFPAVLQSSGLYSLSSVVTVPSSSLGTQTYICNVNHKPSNTKVDKKVEPKSCD
KTHTCPSCPAPEFLGGPSVFLFPPKPKDTLMISRTPEVTCVVVDVSQEDPEVQFNWYVDGVEVHNAKTKPREEQ
FNSKYRVVSVLTVLHQDWLNGKEYKCKVSNKGLPSSIEKTISKAKGQPREPQVYTLPPSREEMTKNQVSLSCAV
KGFYPSDIAVEWESNGQPENNYKTTPPVLDSDGSFFLVSKLTVDKSRWQQGNVFSCSVMHEALHNHYTQKSLSL
SKSCDKTGGGGSGGGGSGGGGSGGGGSGGGGSGGGGSGGGGSGGGGSCPSCPAPEFLGGPSVFLFPPKPKDTLM
ISRTPEVTCVVVDVSQEDPEVQFNWYVDGVEVHNAKTKPREEQFNSDYRVVSVLTVLHQDWLNGKEYKCKVSNK
GLPSSIEKTISKAKGQPREPQVYTLPPSREEMTKNQVSLWCLVKGFYPSDIAVEWESNGQPENNYKTTPPVLDS
DGSFFLYSKLTVDKSRWQQGNVFSCSVMHEALHNHYTQKSLSLSGECGGGGSGGGGSQVQLVQSGAEVKKPGES
VKISCKASGYTFTNYGMNWVRQAPGQGLKWMGWINTYTGESTYADDFKGRFAFSLDTSASTAYLQLSSLRSEDT
AVYFCARFAIKGDYWGQGTLVTVSSASTGGGGSGGGGSGGGGSGGGGSDIVMTQSPLSLPVTPGEPASISCRST
KSLLHSDGITYLYWYLQKPGQSPQLLIYQMSNLASGVPDRFSSSGSGTDFTLKISRVEAEDEGVYYCAQNLEIP
RTFGGGTKLEIKRT**
>Ab#9-HC-aa
(SEQ ID NO: 413)
QLQLQESGPGLVKPSETLSLTCTVSGGSISSSVYYWSWIRQPPGKGLEWIGVIYPSGNTYYSPSLKSRVTISVD
TSKNQFSLKLSSVTAADTAVYYCARTIYDLFDIWGQGTMVTVSSASTKGPSVFPLAPSSKSTSGGTAALGCLVK
DYFPEPVTVSWNSGALTSGVHTFPAVLQSSGLYSLSSVVTVPSSSLGTQTYICNVNHKPSNTKVDKKVEPKSCD
KTHTCPSCPAPEFLGGPSVFLFPPKPKDTLMISRTPEVTCVVVDVSQEDPEVQFNWYVDGVEVHNAKTKPREEQ
FNSKYRVVSVLTVLHQDWLNGKEYKCKVSNKGLPSSIEKTISKAKGQPREPQVYTLPPSREEMTKNQVSLSCAV
KGFYPSDIAVEWESNGQPENNYKTTPPVLDSDGSFFLVSKLTVDKSRWQQGNVFSCSVMHEALHNHYTQKSLSL
SKSCDKTGGGGSGGGGSGGGGSGGGGSGGGGSGGGGSGGGGSGGGGSCPSCPAPEFLGGPSVFLFPPKPKDTLM
ISRTPEVTCVVVDVSQEDPEVQFNWYVDGVEVHNAKTKPREEQFNSDYRVVSVLTVLHQDWLNGKEYKCKVSNK
GLPSSIEKTISKAKGQPREPQVYTLPPSREEMTKNQVSLWCLVKGFYPSDIAVEWESNGQPENNYKTTPPVLDS
DGSFFLYSKLTVDKSRWQQGNVFSCSVMHEALHNHYTQKSLSLSGECGGGGSGGGGSQVQLQQSGGGLVKPGES
VKISCAASGYTFTNYGMNWVKQAPGKGLKWMGWINTYTGESTYADDFKGRFTFSLETSASAAYLQINSLRPEDT
AVYFCARFAIKGDYWGQGTTVTVSSASTGGGGSGGGGSGGGGSGGGGSGDIVMTQSPSSLSASVGDKATITCRS
TKSLLHSNGITYLYWYLQKPGKAPKLLIYQMSNLA
SGVPDRFSSSGSGTEFTLTISSVQPEDEGTYYCAQNLEIPRTFGQGTKLEIK**
>Ab#10-HC-aa
(SEQ ID NO: 414)
QLQLQESGPGLVKPSETLSLTCTVSGGSISSSVYYWSWIRQPPGKGLEWIGVIYPSGNTYYSPSLKSRVTISVD
TSKNQFSLKLSSVTAADTAVYYCARTIYDLFDIWGQGTMVTVSSASTKGPSVFPLAPSSKSTSGGTAALGCLVK
DYFPEPVTVSWNSGALTSGVHTFPAVLQSSGLYSLSSVVTVPSSSLGTQTYICNVNHKPSNTKVDKKVEPKSCD
KTHTCPSCPAPEFLGGPSVFLFPPKPKDTLMISRTPEVTCVVVDVSQEDPEVQFNWYVDGVEVHNAKTKPREEQ
FNSKYRVVSVLTVLHQDWLNGKEYKCKVSNKGLPSSIEKTISKAKGQPREPQVYTLPPSREEMTKNQVSLSCAV
KGFYPSDIAVEWESNGQPENNYKTTPPVLDSDGSFFLVSKLTVDKSRWQQGNVFSCSVMHEALHNHYTQKSLSL
SKSCDKTGGGGSGGGGSGGGGSGGGGSGGGGSGGGGSGGGGSGGGGSCPSCPAPEFLGGPSVFLFPPKPKDTLM
ISRTPEVTCVVVDVSQEDPEVQFNWYVDGVEVHNAKTKPREEQFNSDYRVVSVLTVLHQDWLNGKEYKCKVSNK
GLPSSIEKTISKAKGQPREPQVYTLPPSREEMTKNQVSLWCLVKGFYPSDIAVEWESNGQPENNYKTTPPVLDS
DGSFFLYSKLTVDKSRWQQGNVFSCSVMHEALHNHYTQKSLSLSGECGGGGSGGGGSQVQLQQSGGGLVKPGES
VKISCAASGYTFTNYGMNWVKQAPGKGLKWMGWINTYTGESTYADDFKGRFTFSLETSASAAYLQINSLRPEDT
AVYFCARFAIKGDYWGQGTTVTVSSASTGGGGSGGGGSGGGGSGGGGSGDIVMTQSPSSLSASVGDKATITCRS
TKSLLHSDGITYLYWYLQKPGKAPKLLIYQLSNLASGVPDRFSSSGSGTEFTLTISSVQPEDEGTYYCAQNLEI
PRTFGQGTKLEIK**
>Ab#11-HC-aa
(SEQ ID NO: 415)
QLQLQESGPGLVKPSETLSLTCTVSGGSISSSVYYWSWIRQPPGKGLEWIGVIYPSGNTYYSPSLKSRVTISVD
TSKNQFSLKLSSVTAADTAVYYCARTIYDLFDIWGQGTMVTVSSASTKGPSVFPLAPSSKSTSGGTAALGCLVK
DYFPEPVTVSWNSGALTSGVHTFPAVLQSSGLYSLSSVVTVPSSSLGTQTYICNVNHKPSNTKVDKKVEPKSCD
KTHTCPSCPAPEFLGGPSVFLFPPKPKDTLMISRTPEVTCVVVDVSQEDPEVQFNWYVDGVEVHNAKTKPREEQ
FNSKYRVVSVLTVLHQDWLNGKEYKCKVSNKGLPSSIEKTISKAKGQPREPQVYTLPPSREEMTKNQVSLSCAV
KGFYPSDIAVEWESNGQPENNYKTTPPVLDSDGSFFLVSKLTVDKSRWQQGNVFSCSVMHEALHNHYTQKSLSL
SKSCDKTGGGGSGGGGSGGGGSGGGGSGGGGSGGGGSGGGGSGGGGSCPSCPAPEFLGGPSVFLFPPKPKDTLM
ISRTPEVTCVVVDVSQEDPEVQFNWYVDGVEVHNAKTKPREEQFNSDYRVVSVLTVLHQDWLNGKEYKCKVSNK
GLPSSIEKTISKAKGQPREPQVYTLPPSREEMTKNQVSLWCLVKGFYPSDIAVEWESNGQPENNYKTTPPVLDS
DGSFFLYSKLTVDKSRWQQGNVFSCSVMHEALHNHYTQKSLSLSGECGGGGSGGGGSDIVMTQSPSSLSASVGD
KATITCRSTKSLLHSNGITYLYWYLQKPGKAPKLLIYQMSNLASGVPDRFSSSGSGTEFTLTISSVQPEDEGTY
YCAQNLEIPRTFGQGTKLEIKRTGGGGSGGGGSGGGGSGGGGSGQVQLQQSGGGLVKPGESVKISCAASGYTFT
NYGMNWVKQAPGKGLKWMGWINTYTGESTYADDFKGRFTFSLETSASAAYLQINSLRPEDTAVYFCARFAIKGD
YWGQGTTVTVSS**
>Ab#12-HC-aa
(SEQ ID NO: 416)
QLQLQESGPGLVKPSETLSLTCTVSGGSISSSVYYWSWIRQPPGKGLEWIGVIYPSGNTYYSPSLKSRVTISVD
TSKNQFSLKLSSVTAADTAVYYCARTIYDLFDIWGQGTMVTVSSASTKGPSVFPLAPSSKSTSGGTAALGCLVK
DYFPEPVTVSWNSGALTSGVHTFPAVLQSSGLYSLSSVVTVPSSSLGTQTYICNVNHKPSNTKVDKKVEPKSCD
KTHTCPSCPAPEFLGGPSVFLFPPKPKDTLMISRTPEVTCVVVDVSQEDPEVQFNWYVDGVEVHNAKTKPREEQ
FNSKYRVVSVLTVLHQDWLNGKEYKCKVSNKGLPSSIEKTISKAKGQPREPQVYTLPPSREEMTKNQVSLSCAV
KGFYPSDIAVEWESNGQPENNYKTTPPVLDSDGSFFLVSKLTVDKSRWQQGNVFSCSVMHEALHNHYTQKSLSL
SKSCDKTGGGGSGGGGSGGGGSGGGGSGGGGSGGGGSGGGGSGGGGSCPSCPAPEFLGGPSVFLFPPKPKDTLM
ISRTPEVTCVVVDVSQEDPEVQFNWYVDGVEVHNAKTKPREEQFNSDYRVVSVLTVLHQDWLNGKEYKCKVSNK
GLPSSIEKTISKAKGQPREPQVYTLPPSREEMTKNQVSLWCLVKGFYPSDIAVEWESNGQPENNYKTTPPVLDS
DGSFFLYSKLTVDKSRWQQGNVFSCSVMHEALHNHYTQKSLSLSGECGGGGSGGGGSDIVMTQSPSSLSASVGD
KATITCRSTKSLLHSDGITYLYWYLQKPGKAPKLLIYQLSNLASGVPDRFSSSGSGTEFTLTISSVQPEDEGTY
YCAQNLEIPRTFGQGTKLEIKRTGGGGSGGGGSGGGGSGGGGSGQVQLQQSGGGLVKPGESVKISCAASGYTFT
NYGMNWVKQAPGKGLKWMGWINTYTGESTYADDFKGRFTFSLETSASAAYLQINSLRPEDTAVYFCARFAIKGD
YWGQGTTVTVSS**
> Ab#13-HC-aa
(SEQ ID NO: 417)
QLQLQESGPGLVKPSETLSLTCTVSGGSISSSVYYWSWIRQPPGKGLEWIGVIYPSGNTYYSPSLKSRVTISVD
TSKNQFSLKLSSVTAADTAVYYCARTIYDLFDIWGQGTMVTVSSASTKGPSVFPLAPSSKSTSGGTAALGCLVK
DYFPEPVTVSWNSGALTSGVHTFPAVLQSSGLYSLSSVVTVPSSSLGTQTYICNVNHKPSNTKVDKKVEPKSCD
KTHTCPSCPAPEFLGGPSVFLFPPKPKDTLMISRTPEVTCVVVDVSQEDPEVQFNWYVDGVEVHNAKTKPREEQ
FNSKYRVVSVLTVLHQDWLNGKEYKCKVSNKGLPSSIEKTISKAKGQPREPQVYTLPPSREEMTKNQVSLSCAV
KGFYPSDIAVEWESNGQPENNYKTTPPVLDSDGSFFLVSKLTVDKSRWQQGNVFSCSVMHEALHNHYTQKSLSL
SKSCDKTGGGGSGGGGSGGGGSGGGGSGGGGSGGGGSGGGGSGGGGSCPSCPAPEFLGGPSVFLFPPKPKDTLM
ISRTPEVTCVVVDVSQEDPEVQFNWYVDGVEVHNAKTKPREEQFNSDYRVVSVLTVLHQDWLNGKEYKCKVSNK
GLPSSIEKTISKAKGQPREPQVYTLPPSREEMTKNQVSLWCLVKGFYPSDIAVEWESNGQPENNYKTTPPVLDS
DGSFFLYSKLTVDKSRWQQGNVFSCSVMHEALHNHYTQKSLSLSGECGGGGSGGGGSDIVMTQSPSSLSASVGD
KATITCRSTKSLLHSNGITYLYWYLQKPGKAPKLLIYQMSNLASGVPDRFSSSGSGTEFTLTISSVQPEDEGTY
YCAQNLEIPRTFGQGTKLEIKRTPSHNSHQVPSAGGPTANSGTSGSQVQLQQSGGGLVKPGESVKISCAASGYT
FTNYGMNWVKQAPGKGLKWMGWINTYTGESTYADDFKGRFTFSLETSASAAYLQINSLRPEDTAVYFCARFAIK
GDYWGQGTTVTVSS**
> Ab #13-HC-nt
(SEQ ID NO: 418)
cagctgcagctgcaggagagcggacccggactggtcaagccctccgagacactgtctctgacctgcacagtgtc
aggcgggagcatcagctcctctgtctactattggtcttggattcggcagccccctggaaagggcctggaatgga
tcggcgtgatctacccaagtgggaacacttactattctcccagtctgaaatccagagtgaccatcagtgtcgac
acatcaaagaatcagttcagcctgaaactgagttcagtgacagccgctgatactgcagtctactattgtgccag
gaccatctatgacctgtttgatatttgggggcagggaactatggtgaccgtcagctccgctagcactaagggac
cttccgtgttcccactggccccctcaagcaaatctaccagtgggggaacagcagccctgggctgtctggtgaag
gattactttccagagcccgtgaccgtcagttggaactcaggggctctgactagcggagtgcacaccttccccgc
agtcctgcagtcctctgggctgtactccctgagttcagtggtcactgtgcccagctcctctctgggaacacaga
cttatatctgcaacgtgaatcacaagccttccaataccaaagtcgacaagaaagtcgagcctaagtcatgtgat
aaaacccatacatgcccaagctgtcctgcaccagaatttctgggaggaccaagcgtgttcctgtttccacctaa
gcctaaagacaccctgatgattagtcgcactccagaggtgacctgtgtggtcgtggacgtcagccaggaggatc
ccgaagtgcagtttaactggtacgtcgatggcgtggaagtccacaatgctaagacaaaaccaagagaggaacag
ttcaacagcaagtacagggtcgtgtccgtgctgactgtcctgcatcaggactggctgaacggaaaagagtataa
gtgcaaagtgagcaataagggcctgcccagttcaatcgagaaaacaatttccaaggcaaaaggccagcctcggg
aaccacaggtgtataccctgccacccagcagagaggaaatgacaaagaaccaggtgtcactgagctgtgccgtc
aaaggcttttaccctagcgatatcgctgtggagtgggaatccaatgggcagccagaaaacaattataagaccac
acctccagtgctggacagcgatggatccttctttctggtgtccaagctgaccgtggacaaatctcggtggcagc
agggcaacgtgttctcctgctctgtcatgcatgaggccctgcacaatcattacacccagaaaagtctgtcactg
agcaagtcctgtgataaaacaggaggcgggggatctggcgggggaggcagtgggggaggcgggtccggaggagg
aggaagcggaggaggaggatccggaggaggcgggtctggaggcgggggaagtggaggaggaggatcttgcccaa
gttgtccagcacctgagttcctgggaggaccatccgtgttcctgtttccccctaagcccaaagacaccctgatg
atcagccggacacctgaagtgacttgcgtcgtggtggacgtgtcccaggaggatccagaggtccagtttaactg
gtatgtcgatggcgtggaggtccacaatgctaagaccaaacctcgcgaggaacagttcaactctgactaccgag
tggtcagtgtgctgacagtcctgcatcaggattggctgaacgggaaggaatacaaatgtaaagtgagcaataag
ggactgccaagctccatcgagaagaccatcagcaaagccaaaggccagcccagggaacctcaggtgtacactct
gccaccctcccgcgaggaaatgaccaagaaccaggtgtctctgtggtgtctggtcaaaggattttatccctctg
acatcgccgtggagtgggaaagtaatggccagcctgaaaacaattacaagactacccctccagtgctggactca
gatgggagcttctttctgtatagtaagctgaccgtggataaatcacggtggcagcagggaaatgtgttctcttg
cagtgtcatgcacgaggccctgcataaccattacacacagaagtcattaagcttatcgggagagtgcggtggcg
gagggagcggaggaggcgggtcggacatcgtcatgacccagtcaccgtcctcactgtcggcgtcggtgggtgat
aaggccacaattacatgccgcagcacgaaatcactgctccactccaatgggattacatatctctattggtatct
ccaaaaacccggaaaggcacctaagttgctgatctaccagatgtcgaacttggcatcgggagtacccgataggt
tctcgtcgtcgggaagcggcacggagttcacgctcaccatttcctcagtccagccggaggacgaaggaacttac
tactgcgctcagaatcttgaaatcccgcgcacatttggacaagggacgaaacttgaaatcaagcgaactccgtc
ccacaacagccatcaagtgccctcggcgggagggcccaccgccaattcggggacatcagggagccaggtacagt
tgcagcagtcgggaggcgggctggtaaaacctggtgaaagcgtcaagatctcatgtgcagcctcagggtatacg
ttcaccaattacgggatgaactgggtgaagcaggcgccagggaaaggtcttaagtggatgggatggatcaacac
ttacacgggagagtccacatacgcggatgactttaaggggcggttcacgttttcgttggagacttcagcgtccg
ctgcctacctccaaatcaactcccttagacccgaggacacagcggtctatttctgtgcgcggtttgccattaaa
ggtgattattggggacagggtacgactgtgaccgtgtccagctgataa
cMet-his (bold is signal sequence)
(SEQ ID NO: 419)
MGAPAVLAPGILVLLFTLVQRSNG
ECKEALAKSEMNVNMKYQLPNFTAETPIQNVILHEHHIFLGATNYIYVLNEEDLQKVAEYKTGPVLEHPDCFPC
QDCSSKANLSGGVWKDNINMALVVDTYYDDQLISCGSVNRGTCQRHVFPHNHTADIQSEVHCIFSPQIEEPSQC
PDCVVSALGAKVLSSVKDRFINFFVGNTINSSYFPDHPLHSISVRRLKETKDGFMFLTDQSYIDVLPEFRDSYP
IKYVHAFESNNFIYFLTVQRETLDAQTFHTRIIRFCSINSGLHSYMEMPLECILTEKRKKRSTKKEVFNILQAA
YVSKPGAQLARQIGASLNDDILFGVFAQSKPDSAEPMDRSAMCAFPIKYVNDFFNKIVNKNNVRCLQHFYGPNH
EHCFNRTLLRNSSGCEARRDEYRTEFTTALQRVDLFMGQFSEVLLTSISTFIKGDLTIANLGTSEGRFMQVVVS
RSGPSTPHVNFLLDSHPVSPEVIVEHTLNQNGYTLVITGKKITKIPLNGLGCRHFQSCSQCLSAPPFVQCGWCH
DKCVRSEECLSGTWTQQICLPAIYKVFPNSAPLEGGTRLTICGWDFGFRRNNKFDLKKTRVLLGNESCTLTLSE
STMNTLKCTVGPAMNKHFNMSIIISNGHGTTQYSTFSYVDPVITSISPKYGPMAGGTLLTLTGNYLNSGNSRHI
SIGGKTCTLKSVSNSILECYTPAQTISTEFAVKLKIDLANRETSIFSYREDPIVYEIHPTKSFISGGSTITGVG
KNLNSVSVPRMVINVHEAGRNFTVACQHRSNSEIICCTTPSLQQLNLQLPLKTKAFFMLDGILSKYFDLIYVHN
PVFKPFEKPVMISMGNENVLEIKGNDIDPEAVKGEVLKVGNKSCENIHLHSEAVLCTVPNDLLKLNSELNIEWK
QAISSTVLGKVIVQPDQNFTGGGGSHHHHHH**
Human EpCAM-Fc-his tagged (bold is signal sequence)
(SEQ ID NO: 420)
MGWSLILLFLVAVATRVLS
QEECVCENYKLAVNCFVNNNRQCQCTSVGAQNTVICSKLAAKCLVMKAEMNGSKLGRRAKPEGALQNNDGLYDP
DCDESGLFKAKQCNGTSMCWCVNTAGVRRTDKDTEITCSERVRTYWIIIELKHKAREKPYDSKSLRTALQKEIT
TRYQLDPKFITSILYENNVITIDLVQNSSQKTQNDVDIADVAYYFEKDVKGESLFHSKKMDLTVNGEQLDLDPG
QTLIYYVDEKAPEFSMQGLKIEGRMDPKSSDKTHTCPPCPAPELLGGPSVFLFPPKPKDTLMISRTPEVTCVVV
DVSHEDPEVKFNWYVDGVEVHNAKTKPREEQYNSTYRVVSVLTVLHQDWLNGKEYKCKVSNKALPAPIEKTISK
AKGQPREPQVYTLPPSRDELTKNQVSLTCLVKGFYPSDIAVEWESNGQPENNYKTTPPVLDSDGSFFLYSKLTV
DKSRWQQGNVFSCSVMHEALHNHYTQKSLSLSPGGGGGSHHHHHH**
Anti-c-Met-OA-5D5-HC-aa
(SEQ ID NO: 421)
[sequence omitted]
Anti-c-Met-OA-5D5-LC-aa
(SEQ ID NO: 422)
DIQMTQSPSSLSASVGDRVTITCKSSQSLLYTSSQKNYLAWYQQKPGKAPKLLIYWASTR
ESGVPSRFSGSGSGTDFTLTISSLQPEDFATYYCQQYYAYPWTFGQGTKVEIKR
RESERVED: SEQ ID NO: 423, SEQ ID NO: 424
>Ab#X1-OA-5D5
(SEQ ID NO: 425)
EVQLVESGGGLVQPGGSLRLSCAASGYTFTSYWLHWVRQAPGKGLEWVGMIDPSNSDTRFNPNFKD
RFTISADTSKNTAYLQMNSLRAEDTAVYYCATYRSYVTPLDYWGQGTLVTVSSASTKGPSVFPLAPSSKSTSGG
TAALGCLVKDYFPEPVTVSWNSGALTSGVHTFPAVLQSSGLYSLSSVVTVPSSSLGTQTYICNVNHKPSNTKVD
KKVEPKSCDKTHTCPSCPAPEFLGGPSVFLFPPKPKDTLMISRTPEVTCVVVDVSQEDPEVQFNWYVDGVEVHN
AKTKPREEQFNSKYRVVSVLTVLHQDWLNGKEYKCKVSNKGLPSSIEKTISKAKGQPREPQVYTLPPSREEMTK
NQVSLSCAVKGFYPSDIAVEWESNGQPENNYKTTPPVLDSDGSFFLVSKLTVDKSRWQQGNVFSCSVMHEALHN
HYTQKSLSLSKSCDKTGGGGSGGGGSGGGGSGGGGSGGGGSGGGGSGGGGSGGGGSCPSCPAPEFLGGPSVFLF
PPKPKDTLMISRTPEVTCVVVDVSQEDPEVQFNWYVDGVEVHNAKTKPREEQFNSDYRVVSVLTVLHQDWLNGK
EYKCKVSNKGLPSSIEKTISKAKGQPREPQVYTLPPSREEMTKNQVSLWCLVKGFYPSDIAVEWESNGQPENNY
KTTPPVLDSDGSFFLYSKLTVDKSRWQQGNVFSCSVMHEALHNHYTQKSLSLSGECGGGGSGGGGSDIVMTQSP
LSLPVTPGEPASISCRSTKSLLHSNGITYLYWYLQKPGQSPQLLIYQMSNLASGVPDRFSSSGSGTDFTLKISR
VEAEDEGVYYCAQNLEIPRTFGGGTKLEIKRTGGGGSGGGGSGGGGSGGGGSQVQLVQSGAEVKKPGESVKISC
KASGYTFTNYGMNWVRQAPGQGLKWMGWINTYTGESTYADDFKGRFAFSLDTSASTAYLQLSSLRSEDTAVYFC
ARFAIKGDYWGQGTLVTVSS**
>Ab#X2-OA-5D5
(SEQ ID NO: 426)
EVQLVESGGGLVQPGGSLRLSCAASGYTFTSYWLHWVRQAPGKGLEWVGMIDPSNSDTRFNPNFKD
RFTISADTSKNTAYLQMNSLRAEDTAVYYCATYRSYVTPLDYWGQGTLVTVSS
ASTKGPSVFPLAPSSKSTSGGTAALGCLVKDYFPEPVTVSWNSGALTSGVHTFPAVLQSSGLYSLSSVVTVPSS
SLGTQTYICNVNHKPSNTKVDKKVEPKSCDKTHTCPSCPAPEFLGGPSVFLFPPKPKDTLMISRTPEVTCVVVD
VSQEDPEVQFNWYVDGVEVHNAKTKPREEQFNSKYRVVSVLTVLHQDWLNGKEYKCKVSNKGLPSSIEKTISKA
KGQPREPQVYTLPPSREEMTKNQVSLSCAVKGFYPSDIAVEWESNGQPENNYKTTPPVLDSDGSFFLVSKLTVD
KSRWQQGNVFSCSVMHEALHNHYTQKSLSLSKSCDKTGGGGSGGGGSGGGGSGGGGSGGGGSGGGGSGGGGSGG
GGSCPSCPAPEFLGGPSVFLFPPKPKDTLMISRTPEVTCVVVDVSQEDPEVQFNWYVDGVEVHNAKTKPREEQF
NSDYRVVSVLTVLHQDWLNGKEYKCKVSNKGLPSSIEKTISKAKGQPREPQVYTLPPSREEMTKNQVSLWCLVK
GFYPSDIAVEWESNGQPENNYKTTPPVLDSDGSFFLYSKLTVDKSRWQQGNVFSCSVMHEALHNHYTQKSLSLS
GECGGGGSGGGGSQVQLVQSGSELKKPGESVKVSCKASGYTFTNYGMHWVRQAPGQGLKWMGWINTYTGESTYA
DDFKGRFAFSLDTSASTAYLQISSLKAEDTAVYFCARFAIKGDYWGQGTLVTVSSASTGGGGSGGGGSGGGGSG
GGGSDIVMTQSPLSLPVTPGEPASISCRSTKSLLHSDGITYLYWYLQKPGQSPQLLIYQLSNLASGVPDRFSSS
GSGTDFTLKISRVEAEDEGVYYCAQNLEIPYTFGQGTKVEIK**
>Ab#X3-OA-5D5
(SEQ ID NO: 427)
EVQLVESGGGLVQPGGSLRLSCAASGYTFTSYWLHWVRQAPGKGLEWVGMIDPSNSDTRFNPNFKD
RFTISADTSKNTAYLQMNSLRAEDTAVYYCATYRSYVTPLDYWGQGTLVTVSSASTKGPSVFPLAPSSKSTSGG
TAALGCLVKDYFPEPVTVSWNSGALTSGVHTFPAVLQSSGLYSLSSVVTVPSSSLGTQTYICNVNHKPSNTKVD
KKVEPKSCDKTHTCPSCPAPEFLGGPSVFLFPPKPKDTLMISRTPEVTCVVVDVSQEDPEVQFNWYVDGVEVHN
AKTKPREEQFNSKYRVVSVLTVLHQDWLNGKEYKCKVSNKGLPSSIEKTISKAKGQPREPQVYTLPPSREEMTK
NQVSLSCAVKGFYPSDIAVEWESNGQPENNYKTTPPVLDSDGSFFLVSKLTVDKSRWQQGNVFSCSVMHEALHN
HYTQKSLSLSKSCDKTGGGGSGGGGSGGGGSGGGGSGGGGSGGGGSGGGGSGGGGSCPSCPAPEFLGGPSVFLF
PPKPKDTLMISRTPEVTCVVVDVSQEDPEVQFNWYVDGVEVHNAKTKPREEQFNSDYRVVSVLTVLHQDWLNGK
EYKCKVSNKGLPSSIEKTISKAKGQPREPQVYTLPPSREEMTKNQVSLWCLVKGFYPSDIAVEWESNGQPENNY
KTTPPVLDSDGSFFLYSKLTVDKSRWQQGNVFSCSVMHEALHNHYTQKSLSLSGECGGGGSGGGGSQVQLVQSG
SELKKPGESVKVSCKASGYTFTNYGMNWVRQAPGQGLKWMGWINTYTGESTYADDFKGRFAFSLDTSASTAYLQ
ISSLKAEDTAVYFCARFAIKGDYWGQGTLVTVSSASTGGGGSGGGGSGGGGSGGGGSDIVMTQSPLSLPVTPGE
PASISCRSTKSLLHSDGITYLYWYLQKPGQSPQLLIYQLSNLASGVPDRFSSSGSGTDFTLKISRVEAEDEGVY
YCAQNLEIPRTFGQGTKVEIK**
>Ab#X4-OA-5D5
(SEQ ID NO: 428)
EVQLVESGGGLVQPGGSLRLSCAASGYTFTSYWLHWVRQAPGKGLEWVGMIDPSNSDTRFNPNFKD
RFTISADTSKNTAYLQMNSLRAEDTAVYYCATYRSYVTPLDYWGQGTLVTVSSASTKGPSVFPLAPSSKSTSGG
TAALGCLVKDYFPEPVTVSWNSGALTSGVHTFPAVLQSSGLYSLSSVVTVPSSSLGTQTYICNVNHKPSNTKVD
KKVEPKSCDKTHTCPSCPAPEFLGGPSVFLFPPKPKDTLMISRTPEVTCVVVDVSQEDPEVQFNWYVDGVEVHN
AKTKPREEQFNSKYRVVSVLTVLHQDWLNGKEYKCKVSNKGLPSSIEKTISKAKGQPREPQVYTLPPSREEMTK
NQVSLSCAVKGFYPSDIAVEWESNGQPENNYKTTPPVLDSDGSFFLVSKLTVDKSRWQQGNVFSCSVMHEALHN
HYTQKSLSLSKSCDKTGGGGSGGGGSGGGGSGGGGSGGGGSGGGGSGGGGSGGGGSCPSCPAPEFLGGPSVFLF
PPKPKDTLMISRTPEVTCVVVDVSQEDPEVQFNWYVDGVEVHNAKTKPREEQFNSDYRVVSVLTVLHQDWLNGK
EYKCKVSNKGLPSSIEKTISKAKGQPREPQVYTLPPSREEMTKNQVSLWCLVKGFYPSDIAVEWESNGQPENNY
KTTPPVLDSDGSFFLYSKLTVDKSRWQQGNVFSCSVMHEALHNHYTQKSLSLSGECGGGGSGGGGSDIVMTQSP
LSLPVTPGEPASISCRSTKSLLHSDGITYLYWYLQKPGQSPQLLIYQLSNLASGVPDRFSSSGSGTDFTLKISR
VEAEDEGVYYCAQNLEIPRTFGQGTKVEIKRTGGGGSGGGGSGGGGSGGGGSGQVQLVQSGSELKKPGESVKVS
CKASGYTFTNYGMNWVRQAPGQGLKWMGWINTYTGESTYADDFKGRFAFSLDTSASTAYLQISSLKAEDTAVYF
CARFAIKGDYWGQGTLVTVSS**
>Ab#X5-OA-5D5
(SEQ ID NO: 429)
EVQLVESGGGLVQPGGSLRLSCAASGYTFTSYWLHWVRQAPGKGLEWVGMIDPSNSDTRFNPNFKD
RFTISADTSKNTAYLQMNSLRAEDTAVYYCATYRSYVTPLDYWGQGTLVTVSSASTKGPSVFPLAPSSKSTSGG
TAALGCLVKDYFPEPVTVSWNSGALTSGVHTFPAVLQSSGLYSLSSVVTVPSSSLGTQTYICNVNHKPSNTKVD
KKVEPKSCDKTHTCPSCPAPEFLGGPSVFLFPPKPKDTLMISRTPEVTCVVVDVSQEDPEVQFNWYVDGVEVHN
AKTKPREEQFNSKYRVVSVLTVLHQDWLNGKEYKCKVSNKGLPSSIEKTISKAKGQPREPQVYTLPPSREEMTK
NQVSLSCAVKGFYPSDIAVEWESNGQPENNYKTTPPVLDSDGSFFLVSKLTVDKSRWQQGNVFSCSVMHEALHN
HYTQKSLSLSKSCDKTGGGGSGGGGSGGGGSGGGGSGGGGSGGGGSGGGGSGGGGSCPSCPAPEFLGGPSVFLF
PPKPKDTLMISRTPEVTCVVVDVSQEDPEVQFNWYVDGVEVHNAKTKPREEQFNSDYRVVSVLTVLHQDWLNGK
EYKCKVSNKGLPSSIEKTISKAKGQPREPQVYTLPPSREEMTKNQVSLWCLVKGFYPSDIAVEWESNGQPENNY
KTTPPVLDSDGSFFLYSKLTVDKSRWQQGNVFSCSVMHEALHNHYTQKSLSLSGECGGGGSGGGGSDIVMTQSP
LSLPVTPGEPASISCRSTKSLLHSNGITYLYWYLQKPGQSPQLLIYQMSNLASGVPDRFSSSGSGTDFTLKISR
VEAEDEGVYYCAQNLEIPRTFGGGTKLEIKRTGGGGSGGGGSGGGGSGGGGSQVQLVQSGAEVKKPGESVKISC
KASGYTFTNYGMNWVRQAPGQGLKWMGWINTYTGESTYADDFKGRFAFSLDTSASTAYLQLSSLRSEDTAVYFC
ARFAIKGDYWGQGTLVTVSS**
>Ab#X6-OA-5D5
(SEQ ID NO: 430)
EVQLVESGGGLVQPGGSLRLSCAASGYTFTSYWLHWVRQAPGKGLEWVGMIDPSNSDTRFNPNFKD
RFTISADTSKNTAYLQMNSLRAEDTAVYYCATYRSYVTPLDYWGQGTLVTVSS
ASTKGPSVFPLAPSSKSTSGGTAALGCLVKDYFPEPVTVSWNSGALTSGVHTFPAVLQSSGLYSLSSVVTVPSS
SLGTQTYICNVNHKPSNTKVDKKVEPKSCDKTHTCPSCPAPEFLGGPSVFLFPPKPKDTLMISRTPEVTCVVVD
VSQEDPEVQFNWYVDGVEVHNAKTKPREEQFNSKYRVVSVLTVLHQDWLNGKEYKCKVSNKGLPSSIEKTISKA
KGQPREPQVYTLPPSREEMTKNQVSLSCAVKGFYPSDIAVEWESNGQPENNYKTTPPVLDSDGSFFLVSKLTVD
KSRWQQGNVFSCSVMHEALHNHYTQKSLSLSKSCDKTGGGGSGGGGSGGGGSGGGGSGGGGSGGGGSGGGGSGG
GGSCPSCPAPEFLGGPSVFLFPPKPKDTLMISRTPEVTCVVVDVSQEDPEVQFNWYVDGVEVHNAKTKPREEQF
NSDYRVVSVLTVLHQDWLNGKEYKCKVSNKGLPSSIEKTISKAKGQPREPQVYTLPPSREEMTKNQVSLWCLVK
GFYPSDIAVEWESNGQPENNYKTTPPVLDSDGSFFLYSKLTVDKSRWQQGNVFSCSVMHEALHNHYTQKSLSLS
GECGGGGSGGGGSDIVMTQSPLSLPVTPGEPASISCRSTKSLLHSDGITYLYWYLQKPGQSPQLLIYQLSNLAS
GVPDRFSSSGSGTDFTLKISRVEAEDEGVYYCAQNLEIPRTFGGGTKLEIKRTGGGGSGGGGSGGGGSGGGGSQ
VQLVQSGAEVKKPGESVKISCKASGYTFTNYGMNWVRQAPGQGLKWMGWINTYTGESTYADDFKGRFAFSLDTS
ASTAYLQLSSLRSEDTAVYFCARFAIKGDYWGQGTLVTVSS**
>Ab#X7-OA-5D5
(SEQ ID NO: 431)
EVQLVESGGGLVQPGGSLRLSCAASGYTFTSYWLHWVRQAPGKGLEWVGMIDPSNSDTRFNPNFKD
RFTISADTSKNTAYLQMNSLRAEDTAVYYCATYRSYVTPLDYWGQGTLVTVSSASTKGPSVFPLAPSSKSTSGG
TAALGCLVKDYFPEPVTVSWNSGALTSGVHTFPAVLQSSGLYSLSSVVTVPSSSLGTQTYICNVNHKPSNTKVD
KKVEPKSCDKTHTCPSCPAPEFLGGPSVFLFPPKPKDTLMISRTPEVTCVVVDVSQEDPEVQFNWYVDGVEVHN
AKTKPREEQFNSKYRVVSVLTVLHQDWLNGKEYKCKVSNKGLPSSIEKTISKAKGQPREPQVYTLPPSREEMTK
NQVSLSCAVKGFYPSDIAVEWESNGQPENNYKTTPPVLDSDGSFFLVSKLTVDKSRWQQGNVFSCSVMHEALHN
HYTQKSLSLSKSCDKTGGGGSGGGGSGGGGSGGGGSGGGGSGGGGSGGGGSGGGGSCPSCPAPEFLGGPSVFLF
PPKPKDTLMISRTPEVTCVVVDVSQEDPEVQFNWYVDGVEVHNAKTKPREEQFNSDYRVVSVLTVLHQDWLNGK
EYKCKVSNKGLPSSIEKTISKAKGQPREPQVYTLPPSREEMTKNQVSLWCLVKGFYPSDIAVEWESNGQPENNY
KTTPPVLDSDGSFFLYSKLTVDKSRWQQGNVFSCSVMHEALHNHYTQKSLSLSGECGGGGSGGGGSDIVMTQSP
LSLPVTPGEPASISCRSTKSLLHSDGITYLYWYLQKPGQSPQLLIYQLSNLASGVPDRFSSSGSGTDFTLKISR
VEAEDEGVYYCAQNLEIPRTFGCGTKLEIKRTGGGGSGGGGSGGGGSGGGGSQVQLVQSGAEVKKPGESVKISC
KASGYTFTNYGMNWVRQAPGQCLKWMGWINTYTGESTYADDFKGRFAFSLDTSASTAYLQLSSLRSEDTAVYFC
ARFAIKGDYWGQGTLVTVSS**
>Ab#X8-OA-5D5
(SEQ ID NO: 432)
EVQLVESGGGLVQPGGSLRLSCAASGYTFTSYWLHWVRQAPGKGLEWVGMIDPSNSDTRFNPNFKD
RFTISADTSKNTAYLQMNSLRAEDTAVYYCATYRSYVTPLDYWGQGTLVTVSSASTKGPSVFPLAPSSKSTSGG
TAALGCLVKDYFPEPVTVSWNSGALTSGVHTFPAVLQSSGLYSLSSVVTVPSSSLGTQTYICNVNHKPSNTKVD
KKVEPKSCDKTHTCPSCPAPEFLGGPSVFLFPPKPKDTLMISRTPEVTCVVVDVSQEDPEVQFNWYVDGVEVHN
AKTKPREEQFNSKYRVVSVLTVLHQDWLNGKEYKCKVSNKGLPSSIEKTISKAKGQPREPQVYTLPPSREEMTK
NQVSLSCAVKGFYPSDIAVEWESNGQPENNYKTTPPVLDSDGSFFLVSKLTVDKSRWQQGNVFSCSVMHEALHN
HYTQKSLSLSKSCDKTGGGGSGGGGSGGGGSGGGGSGGGGSGGGGSGGGGSGGGGSCPSCPAPEFLGGPSVFLF
PPKPKDTLMISRTPEVTCVVVDVSQEDPEVQFNWYVDGVEVHNAKTKPREEQFNSDYRVVSVLTVLHQDWLNGK
EYKCKVSNKGLPSSIEKTISKAKGQPREPQVYTLPPSREEMTKNQVSLWCLVKGFYPSDIAVEWESNGQPENNY
KTTPPVLDSDGSFFLYSKLTVDKSRWQQGNVFSCSVMHEALHNHYTQKSLSLSGECGGGGSGGGGSQVQLVQSG
AEVKKPGESVKISCKASGYTFTNYGMNWVRQAPGQGLKWMGWINTYTGESTYADDFKGRFAFSLDTSASTAYLQ
LSSLRSEDTAVYFCARFAIKGDYWGQGTLVTVSSASTGGGGSGGGGSGGGGSGGGGSDIVMTQSPLSLPVTPGE
PASISCRSTKSLLHSDGITYLYWYLQKPGQSPQLLIYQMSNLASGVPDRFSSSGSGTDFTLKISRVEAEDEGVY
YCAQNLEIPRTFGGGTKLEIKRT**
>Ab#X9-OA-5D5
(SEQ ID NO: 433)
EVQLVESGGGLVQPGGSLRLSCAASGYTFTSYWLHWVRQAPGKGLEWVGMIDPSNSDTRFNPNFKD
RFTISADTSKNTAYLQMNSLRAEDTAVYYCATYRSYVTPLDYWGQGTLVTVSS
ASTKGPSVFPLAPSSKSTSGGTAALGCLVKDYFPEPVTVSWNSGALTSGVHTFPAVLQSSGLYSLSSVVTVPSS
SLGTQTYICNVNHKPSNTKVDKKVEPKSCDKTHTCPSCPAPEFLGGPSVFLFPPKPKDTLMISRTPEVTCVVVD
VSQEDPEVQFNWYVDGVEVHNAKTKPREEQFNSKYRVVSVLTVLHQDWLNGKEYKCKVSNKGLPSSIEKTISKA
KGQPREPQVYTLPPSREEMTKNQVSLSCAVKGFYPSDIAVEWESNGQPENNYKTTPPVLDSDGSFFLVSKLTVD
KSRWQQGNVFSCSVMHEALHNHYTQKSLSLSKSCDKTGGGGSGGGGSGGGGSGGGGSGGGGSGGGGSGGGGSGG
GGSCPSCPAPEFLGGPSVFLFPPKPKDTLMISRTPEVTCVVVDVSQEDPEVQFNWYVDGVEVHNAKTKPREEQF
NSDYRVVSVLTVLHQDWLNGKEYKCKVSNKGLPSSIEKTISKAKGQPREPQVYTLPPSREEMTKNQVSLWCLVK
GFYPSDIAVEWESNGQPENNYKTTPPVLDSDGSFFLYSKLTVDKSRWQQGNVFSCSVMHEALHNHYTQKSLSLS
GECGGGGSGGGGSQVQLQQSGGGLVKPGESVKISCAASGYTFTNYGMNWVKQAPGKGLKWMGWINTYTGESTYA
DDFKGRFTFSLETSASAAYLQINSLRPEDTAVYFCARFAIKGDYWGQGTTVTVSSASTGGGGSGGGGSGGGGSG
GGGSGDIVMTQSPSSLSASVGDKATITCRSTKSLLHSNGITYLYWYLQKPGKAPKLLIYQMSNLASGVPDRFSS
SGSGTEFTLTISSVQPEDEGTYYCAQNLEIPRTFGQGTKLEIK**
>Ab#X10-OA-5D5
(SEQ ID NO: 434)
EVQLVESGGGLVQPGGSLRLSCAASGYTFTSYWLHWVRQAPGKGLEWVGMIDPSNSDTRFNPNFKDRFTISADT
SKNTAYLQMNSLRAEDTAVYYCATYRSYVTPLDYWGQGTLVTVSSASTKGPSVFPLAPSSKSTSGGTAALGCLV
KDYFPEPVTVSWNSGALTSGVHTFPAVLQSSGLYSLSSVVTVPSSSLGTQTYICNVNHKPSNTKVDKKVEPKSC
DKTHTCPSCPAPEFLGGPSVFLFPPKPKDTLMISRTPEVTCVVVDVSQEDPEVQFNWYVDGVEVHNAKTKPREE
QFNSKYRVVSVLTVLHQDWLNGKEYKCKVSNKGLPSSIEKTISKAKGQPREPQVYTLPPSREEMTKNQVSLSCA
VKGFYPSDIAVEWESNGQPENNYKTTPPVLDSDGSFFLVSKLTVDKSRWQQGNVFSCSVMHEALHNHYTQKSLS
LSKSCDKTGGGGSGGGGSGGGGSGGGGSGGGGSGGGGSGGGGSGGGGSCPSCPAPEFLGGPSVFLFPPKPKDTL
MISRTPEVTCVVVDVSQEDPEVQFNWYVDGVEVHNAKTKPREEQFNSDYRVVSVLTVLHQDWLNGKEYKCKVSN
KGLPSSIEKTISKAKGQPREPQVYTLPPSREEMTKNQVSLWCLVKGFYPSDIAVEWESNGQPENNYKTTPPVLD
SDGSFFLYSKLTVDKSRWQQGNVFSCSVMHEALHNHYTQKSLSLSGECGGGGSGGGGSQVQLQQSGGGLVKPGE
SVKISCAASGYTFTNYGMNWVKQAPGKGLKWMGWINTYTGESTYADDFKGRFTFSLETSASAAYLQINSLRPED
TAVYFCARFAIKGDYWGQGTTVTVSSASTGGGGSGGGGSGGGGSGGGGSGDIVMTQSPSSLSASVGDKATITCR
STKSLLHSDGITYLYWYLQKPGKAPKLLIYQLSNLASGVPDRFSSSGSGTEFTLTISSVQPEDEGTYYCAQNLE
IPRTFGQGTKLEIK**
>Ab#X11-OA-5D5
(SEQ ID NO: 435)
EVQLVESGGGLVQPGGSLRLSCAASGYTFTSYWLHWVRQAPGKGLEWVGMIDPSNSDTRFNPNFKD
RFTISADTSKNTAYLQMNSLRAEDTAVYYCATYRSYVTPLDYWGQGTLVTVSSASTKGPSVFPLAPSSKSTSGG
TAALGCLVKDYFPEPVTVSWNSGALTSGVHTFPAVLQSSGLYSLSSVVTVPSSSLGTQTYICNVNHKPSNTKVD
KKVEPKSCDKTHTCPSCPAPEFLGGPSVFLFPPKPKDTLMISRTPEVTCVVVDVSQEDPEVQFNWYVDGVEVHN
AKTKPREEQFNSKYRVVSVLTVLHQDWLNGKEYKCKVSNKGLPSSIEKTISKAKGQPREPQVYTLPPSREEMTK
NQVSLSCAVKGFYPSDIAVEWESNGQPENNYKTTPPVLDSDGSFFLVSKLTVDKSRWQQGNVFSCSVMHEALHN
HYTQKSLSLSKSCDKTGGGGSGGGGSGGGGSGGGGSGGGGSGGGGSGGGGSGGGGSCPSCPAPEFLGGPSVFLF
PPKPKDTLMISRTPEVTCVVVDVSQEDPEVQFNWYVDGVEVHNAKTKPREEQFNSDYRVVSVLTVLHQDWLNGK
EYKCKVSNKGLPSSIEKTISKAKGQPREPQVYTLPPSREEMTKNQVSLWCLVKGFYPSDIAVEWESNGQPENNY
KTTPPVLDSDGSFFLYSKLTVDKSRWQQGNVFSCSVMHEALHNHYTQKSLSLSGECGGGGSGGGGSDIVMTQSP
SSLSASVGDKATITCRSTKSLLHSNGITYLYWYLQKPGKAPKLLIYQMSNLASGVPDRFSSSGSGTEFTLTISS
VQPEDEGTYYCAQNLEIPRTFGQGTKLEIKRTGGGGSGGGGSGGGGSGGGGSGQVQLQQSGGGLVKPGESVKIS
CAASGYTFTNYGMNWVKQAPGKGLKWMGWINTYTGESTYADDFKGRFTFSLETSASAAYLQINSLRPEDTAVYF
CARFAIKGDYWGQGTTVTVSS**
>Ab#X12-OA-5D5
(SEQ ID NO: 436)
EVQLVESGGGLVQPGGSLRLSCAASGYTFTSYWLHWVRQAPGKGLEWVGMIDPSNSDTRFNPNFKD
RFTISADTSKNTAYLQMNSLRAEDTAVYYCATYRSYVTPLDYWGQGTLVTVSSASTKGPSVFPLAPSSKSTSGG
TAALGCLVKDYFPEPVTVSWNSGALTSGVHTFPAVLQSSGLYSLSSVVTVPSSSLGTQTYICNVNHKPSNTKVD
KKVEPKSCDKTHTCPSCPAPEFLGGPSVFLFPPKPKDTLMISRTPEVTCVVVDVSQEDPEVQFNWYVDGVEVHN
AKTKPREEQFNSKYRVVSVLTVLHQDWLNGKEYKCKVSNKGLPSSIEKTISKAKGQPREPQVYTLPPSREEMTK
NQVSLSCAVKGFYPSDIAVEWESNGQPENNYKTTPPVLDSDGSFFLVSKLTVDKSRWQQGNVFSCSVMHEALHN
HYTQKSLSLSKSCDKTGGGGSGGGGSGGGGSGGGGSGGGGSGGGGSGGGGSGGGGSCPSCPAPEFLGGPSVFLF
PPKPKDTLMISRTPEVTCVVVDVSQEDPEVQFNWYVDGVEVHNAKTKPREEQFNSDYRVVSVLTVLHQDWLNGK
EYKCKVSNKGLPSSIEKTISKAKGQPREPQVYTLPPSREEMTKNQVSLWCLVKGFYPSDIAVEWESNGQPENNY
KTTPPVLDSDGSFFLYSKLTVDKSRWQQGNVFSCSVMHEALHNHYTQKSLSLSGECGGGGSGGGGSDIVMTQSP
SSLSASVGDKATITCRSTKSLLHSDGITYLYWYLQKPGKAPKLLIYQLSNLASGVPDRFSSSGSGTEFTLTISS
VQPEDEGTYYCAQNLEIPRTFGQGTKLEIKRTGGGGSGGGGSGGGGSGGGGSGQVQLQQSGGGLVKPGESVKIS
CAASGYTFTNYGMNWVKQAPGKGLKWMGWINTYTGESTYADDFKGRFTFSLETSASAAYLQINSLRPEDTAVYF
CARFAIKGDYWGQGTTVTVSS**
>Ab#X13-OA-5D5
(SEQ ID NO: 437)
EVQLVESGGGLVQPGGSLRLSCAASGYTFTSYWLHWVRQAPGKGLEWVGMIDPSNSDTRFNPNFKD
RFTISADTSKNTAYLQMNSLRAEDTAVYYCATYRSYVTPLDYWGQGTLVTVSSASTKGPSVFPLAPSSKSTSGG
TAALGCLVKDYFPEPVTVSWNSGALTSGVHTFPAVLQSSGLYSLSSVVTVPSSSLGTQTYICNVNHKPSNTKVD
KKVEPKSCDKTHTCPSCPAPEFLGGPSVFLFPPKPKDTLMISRTPEVTCVVVDVSQEDPEVQFNWYVDGVEVHN
AKTKPREEQFNSKYRVVSVLTVLHQDWLNGKEYKCKVSNKGLPSSIEKTISKAKGQPREPQVYTLPPSREEMTK
NQVSLSCAVKGFYPSDIAVEWESNGQPENNYKTTPPVLDSDGSFFLVSKLTVDKSRWQQGNVFSCSVMHEALHN
HYTQKSLSLSKSCDKTGGGGSGGGGSGGGGSGGGGSGGGGSGGGGSGGGGSGGGGSCPSCPAPEFLGGPSVFLF
PPKPKDTLMISRTPEVTCVVVDVSQEDPEVQFNWYVDGVEVHNAKTKPREEQFNSDYRVVSVLTVLHQDWLNGK
EYKCKVSNKGLPSSIEKTISKAKGQPREPQVYTLPPSREEMTKNQVSLWCLVKGFYPSDIAVEWESNGQPENNY
KTTPPVLDSDGSFFLYSKLTVDKSRWQQGNVFSCSVMHEALHNHYTQKSLSLSGECGGGGSGGGGSDIVMTQSP
SSLSASVGDKATITCRSTKSLLHSNGITYLYWYLQKPGKAPKLLIYQMSNLASGVPDRFSSSGSGTEFTLTISS
VQPEDEGTYYCAQNLEIPRTFGQGTKLEIKRTPSHNSHQVPSAGGPTANSGTSGSQVQLQQSGGGLVKPGESVK
ISCAASGYTFTNYGMNWVKQAPGKGLKWMGWINTYTGESTYADDFKGRFTFSLETSASAAYLQINSLRPEDTAV
YFCARFAIKGDYWGQGTTVTVSS**
>Anti-EpCAM-HC1 aa
(SEQ ID NO: 438)
QVQLVQSGAEVKKPGASVKVSCKASGYTFTNYGMNWVRQAPGQGLKWMGWINTYTGESTYADDFKGRVTITADT
SASTAYMELSSLRSEDTAVYYCARFAIKGDYWGQGTLVTVSS
>Anti-EpCAM-HC1 nt
(SEQ ID NO: 439)
caagtgcagttggtccagagcggtgcggaggtaaagaaacccggtgcatccgtgaaggtgtcgtgcaaagcctc
cgggtatacgttcacgaactatgggatgaactgggtcagacaagcaccgggtcagggactcaaatggatggggt
ggatcaatacatacacaggggaatcgacctacgcggatgactttaagggaagggtcaccattacggcggacacc
tcggcatcgactgcgtatatggaactctcatcacttcgctcggaggacacagccgtctactattgtgcgcggtt
tgcgatcaagggagattactggggacagggaactttggtaacagtatcaagc
>Anti-EpCAM-HC2 aa
(SEQ ID NO: 440)
QVQLVQSGAEVKKPGASVKVSCKASGYTFTNYGMNWVRQAPGQGLKWMGWINTYTGESTYADDFKGRVTITLDT
SASTAYMELSSLRSEDTAVYFCARFAIKGDYWGQGTLVTVSS
>Anti-EpCAM-HC2 nt
(SEQ ID NO: 441)
caagtgcagttggtccagagcggtgcggaggtaaagaaacccggtgcatccgtgaaggtgtcgtgcaaagcctc
cgggtatacgttcacgaactatgggatgaactgggtcagacaagcaccgggtcagggactcaaatggatggggt
ggatcaatacatacacaggggaatcgacctacgcggatgactttaagggaagggtcaccattacgttggacacc
tcggcatcgactgcgtatatggaactctcatcacttcgctcggaggacacagccgtctacttctgtgcgcggtt
tgcgatcaagggagattactggggacagggaactttggtaacagtatcaagc
>anti-EpCAM-HC3 aa
(SEQ ID NO: 442)
QVQLQQSGGGLVKPGGSVKISCKASGYTFTNYGMNWVKQAPGKGLKWMGWINTYTGESTYADDFKGRFAFSLET
SASAAYLQINSLRPEDTAVYFCARFAIKGDYWGQGTLVTVSS
>Anti-EpCAM-HC3 nt
(SEQ ID NO: 443)
caggtacagctgcagcaaagcgggggaggactcgtgaagcctggtggttcggtcaaaatctcgtgtaaagcgtc
agggtacaccttcacaaactatggtatgaactgggtgaaacaggcacccggaaagggtcttaagtggatgggct
ggatcaatacctacacgggggagtcgacatatgcggacgactttaaaggacggttcgcgttttcgttggagact
agcgcctccgctgcctacctccaaatcaatagccttaggccggaagatacggcggtctacttttgcgcaagatt
tgccattaagggggattattggggccaggggacgctggtgacagtcagctccgctagc
>anti-EpCAM-HC4 aa
(SEQ ID NO: 444)
QVQLVQSGAEVKKPGASVKVSCKASGYTFTNYGMNWVRQAPGQGLKWMGWINTYTGESTYADDFKGRFAFSLDT
SASTAYMELSSLRSEDTAVYFCARFAIKGDYWGQGTLVTVSS
>anti-EpCAM-HC4 nt
(SEQ ID NO: 445)
caggtccagcttgtgcagtccggagccgaagtcaagaagccgggagccagcgtaaaggtgtcatgtaaggcgtc
ggggtatacattcacgaactacggtatgaattgggtgcgccaagctcccggacagggtttgaaatggatggggt
ggatcaacacgtatacaggggaatcaacttacgccgacgacttcaagggaaggttcgcattttcgttggataca
tcggcgtccacggcgtacatggagctgtcaagcctgcggtcggaggacacggcggtatacttctgcgcaagatt
tgctatcaaaggtgattattgggggcagggaaccctggtaaccgtgagcagc
>anti-EpCAM-HC5 aa
(SEQ ID NO: 446)
QVQLVQSGSELKKPGASVKVSCKASGYTFTNYGMNWVRQAPGQGLKWMGWINTYTGESTYADDFKGRFAFSLDT
SASTAYLQISSLKAEDTAVYFCARFAIKGDYWGQGTLVTVSS
>anti-EpCAM-HC5 nt
(SEQ ID NO: 447)
caggtccagctggtgcagtcaggttcagagctgaagaagcccggagcgtccgtcaaagtgtcatgcaaggcctc
gggttacacgtttacgaactacggtatgaattgggtccgccaggctccgggccagggactgaaatggatgggat
ggatcaacacatatactggtgaatccacgtatgcggacgactttaaggggagattcgcgttcagccttgataca
tcggcgtcgaccgcgtacctccaaatctcgtccttgaaagcagaggacactgcagtatacttttgtgcccggtt
cgctatcaagggagattattggggccaagggaccttggtgacagtgtccagc
>anti-EpCAM-HC6 aa
(SEQ ID NO: 448)
QVQLVQSGAEVKKPGASVKISCKASGYTFTNYGMNWVRQAPGQGLKWMGWINTYTGESTYADDFKGRFTITLDT
SASTAYMELSSLRSEDTAVYYCARFAIKGDYWGQGTLVTVSS
>anti-EpCAM-HC6 nt
(SEQ ID NO: 449)
caagtccagttggtacaatcgggtgccgaggtaaagaaaccgggagcgtcggtcaaaatcagctgcaaggcctc
aggctatacctttacaaactacggcatgaattgggtgagacaggcacccgggcagggattgaaatggatgggtt
ggatcaacacgtatacaggggagtccacctatgcagatgactttaaggggcgcttcactatcacgctcgacacg
tccgcgtcgacggcgtacatggaactgtcatcgcttcggagcgaagatacagccgtgtactattgtgctaggtt
tgcgattaagggagactactggggacagggaaccctcgtaactgtgtcatca
>anti-EpCAM-HC7 aa
(SEQ ID NO: 450)
QVQLVQSGAEVKKPGASVKISCKASGYTFTNYGMNWVRQAPGQGLKWMGWINTYTGESTYADDFKGRFAFSLDT
SASTAYLQLSSLRSEDTAVYFCARFAIKGDYWGQGTLVTVSS
>anti-EpCAM-HC7 nt
(SEQ ID NO: 451)
caagtgcagctggtacaatcaggtgcggaggtgaaaaagccgggtgcctccgtcaagatttcatgcaaggcctc
gggatacacattcaccaactatgggatgaattgggtgaggcaggctcccggtcaggggttgaaatggatggggt
ggattaacacatatacgggagaaagcacgtatgcggacgacttcaaggggcgcttcgcgttttccctggatact
tcggcatcgactgcgtacctccagttgtcgtcgcttagatccgaggacacggccgtctacttctgtgcacggtt
tgcaatcaagggggattactggggacagggaacgcttgtaaccgtaagctca
>Anti-EpCAM-LC1 aa
(SEQ ID NO: 452)
DIVMTQSPLSLPVTPGEPASISCRSTKSLLHSNGITYLYWYLQKPGQSPQLLIYQMSNLASGVPDRFSGSGSGT
DFTLKISRVEAEDVGVYYCAQNLEIPRTFGQGTKVEIK
>Anti-EpCAM-LC1 nt
(SEQ ID NO: 453)
gacattgtcatgacgcagtcgccgctctcgctcccggtcacaccgggagaacccgcgtccatttcatgcagatc
gacaaagtcactcctccattcaaatggaatcacttacttgtactggtatcttcaaaaacccggtcagtcaccac
agttgctcatctaccaaatgtccaatttggcttcgggagtgcccgaccgattcagcggttcggggagcggtacg
gattttacgttgaagatcagcagggtagaggcggaggacgtgggggtgtactattgtgcacagaaccttgaaat
tccacgcacctttggacaaggcaccaaggtcgaaatcaagcgtacggtggcggcaccttcagtgttcatctttc
ccccttccgatgaacagctcaaaagcgggactgcatccgtagtctgtcttttgaacaacttctatcccagagag
gcgaaagtacagtggaaggtggacaacgcccttcaatcaggcaatagccaggagtcggtgacggagcaggattc
caaagatagcacatactcgctttcatccactttgacattgtcgaaagcggactacgaaaagcacaaggtctatg
cgtgcgaggtgacgcaccagggactttcgtcgccggtaaccaagtcgttcaatcgcggggagtgctgataa
>Anti-EpCAM-LC2 aa
(SEQ ID NO: 454)
DIVMTQSPSSLSASVGDKATITCRSTKSLLHSNGITYLYWYLQKPGKAPKLLIYQMSNLASGVPDRFSSSGSGT
DFTLRISSVQPEDFATYYCAQNLEIPRTFGGGTKLEIK
>Anti-EpCAM-LC2 nt
(SEQ ID NO: 455)
gacattgtcatgacccagtcgccgtcatccctttcagcgagcgtgggggataaggcaacgatcacgtgtcgaag
caccaaatccttgctgcacagcaacgggattacgtatttgtactggtatttgcaaaaacccgggaaagccccga
agctcctcatctaccagatgtcgaatctggcgtcgggggtgccagatcggttctccagcagcgggtcgggtaca
gacttcacactccggatctcatcagtgcagcccgaggactttgcgacctactattgtgcccaaaatcttgaaat
cccgagaacgttcggaggtggcacgaaattggagattaaa
>anti-EpCAM-LC3 aa
(SEQ ID NO: 456)
DIVMTQSPLSLPVTPGEPASISCRSTKSLLHSNGITYLYWYLQKPGQSPQLLIYQMSNLASGVPDRFSSSGSGT
DFTLKISRVEAEDVGVYYCAQNLEIPRTFGQGTKVEIK
>anti-EpCAM-LC3 nt
(SEQ ID NO: 457)
gatatcgtaatgacccaatcgccgttgtcgcttccagtcacacccggggagcctgcttcgattagctgcagatc
aacgaagtcgctcctccattcaaacgggattacgtatttgtactggtatcttcaaaagccgggtcagagcccgc
agctgctgatctaccagatgtccaacttggcctcgggcgtccccgaccggtttagcagcagcgggtcgggaacg
gacttcactctcaagatctcaagggtcgaagcggaagatgtgggtgtgtattactgtgcgcagaatcttgagat
tccccgaacattcggtcagggaaccaaagtcgagatcaag
>anti-EpCAM-LC4 aa
(SEQ ID NO: 458)
DIVMTQSPLSLPVTPGEPASISCRSTKSLLHSNGITYLYWYLQKPGQSPQLLIYQMSNLASGVPDRFSSSGSGT
DFTLKISRVEAEDVGVYYCAQNLEIPRTFGGGTKLEIK
>anti-EpCAM-LC4 NT
(SEQ ID NO: 459)
Gacatcgtgatgacgcagtccccactgtcgctccctgtaacaccaggggagcccgcttccatttcgtgtaggtc
aacgaagtccttgcttcatagcaatgggatcacttacttgtactggtatctccaaaaaccgggtcagtcccctc
agttgctgatctaccagatgtcgaaccttgcgagcggtgtcccggatcgattttcatcgtccggatcgggaacc
gacttcacactgaagattagccgcgtggaggccgaagatgtcggggtctactactgtgctcaaaaccttgagat
tccccggacgtttggaggcggcacgaagctggaaatcaag
>Anti-EpCAM scFv-v1 aa
(SEQ ID NO: 460)
QVQLVQSGSELKKPGESVKVSCKASGYTFTNYGMNWVRQAPGQCLKWMGWINTYTGESTYADDFKGRFAFSLDT
SASTAYLQISSLKAEDTAVYFCARFAIKGDYWGQGTLVTVSSASTGGGGSGGGGSGGGGSGGGGSDIVMTQSPL
SLPVTPGEPASISCRSTKSLLHSDGITYLYWYLQKPGQSPQLLIYQLSNLASGVPDRFSSSGSGT
                                                          * *
DFTLKISRVEAEDEGVYYCAQNLEIPRTFGCGTKVEIK**
>Anti-EpCAM scFv-v1 nt
(SEQ ID NO: 461)
caggtacaactcgtgcagtcggggtcggagcttaagaagccgggagagtcggtaaaagtgtcgtgtaaagcctc
cgggtatacctttacgaattacggcatgaactgggtccggcaggcacccggtcagtgtctcaagtggatgggct
ggatcaatacgtacacgggcgaatccacttatgcagatgactttaagggaagattcgcgttctcattggacaca
tcagcgtcaacggcgtatcttcaaatttcgtccttgaaagcggaggacacggcggtctatttctgcgcacgatt
cgctatcaaaggagattactggggtcaggggacacttgtgacagtgtcgagcgccagcaccggaggtggaggga
gcggaggaggaggtagcggtggcggtggctcgggtggaggtggatcggacatcgtcatgactcagagccctctg
tcactgcccgtaactcccggggagcccgcctccattagctgtcggtcgacaaagtccttgctccactcagatgg
aatcacgtatttgtactggtacttgcaaaagcctggacagtcgccacagctccttatctaccagttgtccaacc
tggcgtcgggagtaccggaccgcttttcatcatccgggtcaggcaccgatttcacactgaagattagccgcgtg
gaggcggaggacgaaggggtctactactgcgcccagaacctcgaaattccgaggacctttggatgcggtactaa
agtggaaatcaagtgataa
>Anti-EpCAM scFv-v2 aa
(SEQ ID NO: 462)
QVQLVQSGSELKKPGESVKVSCKASGYTFTNYGMHWVRQAPGQGLKWMGWINTYTGESTYADDFKGRFAFSLDT
SASTAYLQISSLKAEDTAVYFCARFAIKGDYWGQGTLVTVSSASTGGGGSGGGGSGGGGSGGGGSDIVMTQSPL
SLPVTPGEPASISCRSTKSLLHSDGITYLYWYLQKPGQSPQLLIYQLSNLASGVPDRFSSSGSGT
                                                          * *
DFTLKISRVEAEDEGVYYCAQNLEIPYTFGQGTKVEIK**
>Anti-EpCAM scFv-v2 nt
(SEQ ID NO: 463)
caggtacaactcgtgcagtcggggtcggagcttaagaagccgggagagtcggtaaaagtgtcgtgtaaagcctc
cgggtatacctttacgaattacggcatgcattgggtccggcaggcacccggtcaggggctcaagtggatgggct
ggatcaatacgtacacgggcgaatccacttatgcagatgactttaagggaagattcgcgttctcattggacaca
tcagcgtcaacggcgtatcttcaaatttcgtccttgaaagcggaggacacggcggtctatttctgcgcacgatt
cgctatcaaaggagattactggggtcaggggacacttgtgacagtgtcgagcgccagcaccggaggtggaggga
gcggaggaggaggtagcggtggcggtggctcgggtggaggtggatcggacatcgtcatgactcagagccctctg
tcactgcccgtaactcccggggagcccgcctccattagctgtcggtcgacaaagtccttgctccactcagatgg
aatcacgtatttgtactggtacttgcaaaagcctggacagtcgccacagctccttatctaccagttgtccaacc
tggcgtcgggagtaccggaccgcttttcatcatccgggtcaggcaccgatttcacactgaagattagccgcgtg
gaggcggaggacgaaggggtctactactgcgcccagaacctcgaaattccgtacacctttggacaaggtactaa
agtggaaatcaagtgataa
>Anti-EpCAM scFv-v3 aa
(SEQ ID NO: 464)
QVQLVQSGSELKKPGESVKVSCKASGYTFTNYGMNWVRQAPGQGLKWMGWINTYTGESTYADDFKGRFAFSLDT
SASTAYLQISSLKAEDTAVYFCARFAIKGDYWGQGTLVTVSSASTGGGGSGGGGSGGGGSGGGGSDIVMTQSPL
SLPVTPGEPASISCRSTKSLLHSDGITYLYWYLQKPGQSPQLLIYQLSNLASGVPDRFSSSGSGT
                                                          * *
DFTLKISRVEAEDEGVYYCAQNLEIPRTFGQGTKVEIK **
>Anti-EpCAM scFv-v3 nt
(SEQ ID NO: 465)
caggtacaactcgtgcagtcggggtcggagcttaagaagccgggagagtcggtaaaagtgtcgtgtaaagcctc
cgggtatacctttacgaattacggcatgaactgggtccggcaggcacccggtcaggggctcaagtggatgggct
ggatcaatacgtacacgggcgaatccacttatgcagatgactttaagggaagattcgcgttctcattggacaca
tcagcgtcaacggcgtatcttcaaatttcgtccttgaaagcggaggacacggcggtctatttctgcgcacgatt
cgctatcaaaggagattactggggtcaggggacacttgtgacagtgtcgagcgccagcaccggaggtggaggga
gcggaggaggaggtagcggtggcggtggctcgggtggaggtggatcggacatcgtcatgactcagagccctctg
tcactgcccgtaactcccggggagcccgcctccattagctgtcggtcgacaaagtccttgctccactcagatgg
aatcacgtatttgtactggtacttgcaaaagcctggacagtcgccacagctccttatctaccagttgtccaacc
tggcgtcgggagtaccggaccgcttttcatcatccgggtcaggcaccgatttcacactgaagattagccgcgtg
gaggcggaggacgaaggggtctactactgcgcccagaacctcgaaattccgaggacctttggacaaggtactaa
agtggaaatcaagtgataa
>Anti-EpCAM scFv-v4 aa
(SEQ ID NO: 466)
DIVMTQSPLSLPVTPGEPASISCRSTKSLLHSDGITYLYWYLQKPGQSPQLLIYQLSNLASGVPDRFSSSG
                                                                * *
SGTDFTLKISRVEAEDEGVYYCAQNLEIPRTFGQGTKVEIKRTGGGGSGGGGSGGGGSGGGGSGQVQLVQSGSE
LKKPGESVKVSCKASGYTFTNYGMNWVRQAPGQGLKWMGWINTYTGESTYADDFKGRFAFSLDTSASTAYLQIS
SLKAEDTAVYFCARFAIKGDYWGQGTLVTVSS**
>Anti-EpCAM scFv-v4 nt
(SEQ ID NO: 467)
gatatcgtgatgacacagtcacccctgtcgctccctgtgactcccggagagcctgcgtccatctcgtgccggtc
aacaaagtccctgctgcacagcgacggaattacgtatttgtactggtatttgcaaaaacccggacagagcccgc
aattgttgatctaccagctctcaaaccttgcgagcggggtcccggatcgctttagctcgtcggggtcaggaact
gacttcacactcaaaatctcaagggtcgaggccgaggatgaaggtgtctattactgcgctcagaatctcgaaat
cccgcggacctttggtcagggtacgaaggtagagatcaagcgaacgggaggcggtgggtccggtggcggtggtt
ccggcggaggtggttcgggaggaggaggtagcggtcaggtgcagcttgtccagtcgggatcggagctcaagaag
ccaggagagtcggtgaaagtatcgtgtaaagcctcggggtacacattcacgaactacggcatgaattgggtgag
acaagctcccgggcagggcttgaaatggatgggatggattaacacctacacaggggaatccacatatgcggacg
acttcaaggggaggttcgcgttttcacttgatacttcagcgagcacggcgtatctccaaatttcgtcgcttaag
gcagaagataccgcagtatacttttgcgccagattcgcgattaaaggggactattggggacaggggacccttgt
cacggtgtcatcatgataa
>Anti-EpCAM scFv-v5 aa
(SEQ ID NO: 468)
DIVMTQSPLSLPVTPGEPASISCRSTKSLLHSNGITYLYWYLQKPGQSPQLLIYQMSNLASGVPDRFSSSGSGT
DFTLKISRVEAEDEGVYYCAQNLEIPRTFGGGTKLEIKRTGGGGSGGGGSGGGGSGGGGSQVQLVQSGAEVKKP
GESVKISCKASGYTFTNYGMNWVRQAPGQGLKWMGWINTYTGESTYADDFKGRFAFSLDTSASTAYLQLSSLRS
EDTAVYFCARFAIKGDYWGQGTLVTVSS**
>Anti-EpCAM scFv-v5 nt
(SEQ ID NO: 469)
gatatcgtgatgacacagtcacccctgtcgctccctgtgactcccggagagcctgcgtccatctcgtgccggtc
aacaaagtccctgctgcacagcaatggaattacgtatttgtactggtatttgcaaaaacccggacagagcccgc
aattgttgatctaccagatgtcaaaccttgcgagcggggtcccggatcgctttagctcgtcggggtcaggaact
gacttcacactcaaaatctcaagggtcgaggccgaggatgaaggtgtctattactgcgctcagaatctcgaaat
cccgcggacctttggtggaggtacgaagctggagatcaagcgaacgggaggcggtgggtccggtggcggtggtt
ccggcggaggtggttcgggaggaggaggtagccaggtgcagcttgtccagtcgggagcagaggtaaagaagcca
ggagagtcggtgaaaatctcgtgtaaagcctcggggtacacattcacgaactacggcatgaattgggtgagaca
agctcccgggcagggcttgaaatggatgggatggattaacacctacacaggggaatccacatatgcggacgact
tcaaggggaggttcgcgttttcacttgatacttcagcgagcacggcgtatctccaactctcgtcgcttcgctcc
gaagataccgcagtatacttttgcgccagattcgcgattaaaggggactattggggacaggggacccttgtcac
ggtgtcatcatgataa
>Anti-EpCAM scFv-v6 aa
(SEQ ID NO: 470)
DIVMTQSPLSLPVTPGEPASISCRSTKSLLHSDGITYLYWYLQKPGQSPQLLIYQLSNLASGVPDRFSSSG
                                                                * *
SGTDFTLKISRVEAEDEGVYYCAQNLEIPRTFGGGTKLEIKRTGGGGSGGGGSGGGGSGGGGSQVQLVQSGAEV
KKPGESVKISCKASGYTFTNYGMNWVRQAPGQGLKWMGWINTYTGESTYADDFKGRFAFSLDTSASTAYLQLSS
LRSEDTAVYFCARFAIKGDYWGQGTLVTVSS**
>Anti-EpCAM scFv-v6 nt
(SEQ ID NO: 471)
gatatcgtgatgacacagtcacccctgtcgctccctgtgactcccggagagcctgcgtccatctcgtgccggtc
aacaaagtccctgctgcacagcgacggaattacgtatttgtactggtatttgcaaaaacccggacagagcccgc
aattgttgatctaccagctctcaaaccttgcgagcggggtcccggatcgctttagctcgtcggggtcaggaact
gacttcacactcaaaatctcaagggtcgaggccgaggatgaaggtgtctattactgcgctcagaatctcgaaat
cccgcggacctttggtggaggtacgaagctggagatcaagcgaacgggaggcggtgggtccggtggcggtggtt
ccggcggaggtggttcgggaggaggaggtagccaggtgcagcttgtccagtcgggagcagaggtaaagaagcca
ggagagtcggtgaaaatctcgtgtaaagcctcggggtacacattcacgaactacggcatgaattgggtgagaca
agctcccgggcagggcttgaaatggatgggatggattaacacctacacaggggaatccacatatgcggacgact
tcaaggggaggttcgcgttttcacttgatacttcagcgagcacggcgtatctccaactgtcgtcgcttcgctcc
gaagataccgcagtatacttttgcgccagattcgcgattaaaggggactattggggacaggggacccttgtcac
ggtgtcatcatgataa
>Anti-EpCAM scFv-v7 aa
(SEQ ID NO: 472)
DIVMTQSPLSLPVTPGEPASISCRSTKSLLHSDGITYLYWYLQKPGQSPQLLIYQLSNLASGVPDRFSSSG
SGTDFTLKISRVEAEDEGVYYCAQNLEIPRTFGCGTKLEIKRTGGGGSGGGGSGGGGSGGGGSQVQLVQSGAEV
KKPGESVKISCKASGYTFTNYGMNWVRQAPGQCLKWMGWINTYTGESTYADDFKGRFAFSLDTSASTAYLQLSS
LRSEDTAVYFCARFAIKGDYWGQGTLVTVSS**
>Anti-EpCAM scFv-v7 nt
(SEQ ID NO: 473)
gatatcgtgatgacacagtcacccctgtcgctccctgtgactcccggagagcctgcgtccatctcgtgccggtc
aacaaagtccctgctgcacagcgacggaattacgtatttgtactggtatttgcaaaaacccggacagagcccgc
aattgttgatctaccagctctcaaaccttgcgagcggggtcccggatcgctttagctcgtcggggtcaggaact
gacttcacactcaaaatctcaagggtcgaggccgaggatgaaggtgtctattactgcgctcagaatctcgaaat
cccgcggacctttggttgcggtacgaagctggagatcaagcgaacgggaggcggtgggtccggtggcggtggtt
ccggcggaggtggttcgggaggaggaggtagccaggtgcagcttgtccagtcgggagcagaggtaaagaagcca
ggagagtcggtgaaaatctcgtgtaaagcctcggggtacacattcacgaactacggcatgaattgggtgagaca
agctcccgggcagtgtttgaaatggatgggatggattaacacctacacaggggaatccacatatgcggacgact
tcaaggggaggttcgcgttttcacttgatacttcagcgagcacggcgtatctccaactgtcgtcgcttcgctcc
gaagataccgcagtatacttttgcgccagattcgcgattaaaggggactattggggacaggggacccttgtcac
ggtgtcatcatgataa
>Anti-EpCAM scFv-v8 aa
(SEQ ID NO: 474)
QVQLVQSGAEVKKPGESVKISCKASGYTFTNYGMNWVRQAPGQGLKWMGWINTYTGESTYADDFKGRFAFSLDT
SASTAYLQLSSLRSEDTAVYFCARFAIKGDYWGQGTLVTVSSASTGGGGSGGGGSGGGGSGGGGSDIVMTQSPL
SLPVTPGEPASISCRSTKSLLHSDGITYLYWYLQKPGQSPQLLIYQMSNLASGVPDRFSSSGSGT
                                                          *
DFTLKISRVEAEDEGVYYCAQNLEIPRTFGGGTKLEIKRT**
>Anti-EpCAM scFv-v8 nt
(SEQ ID NO: 475)
caggtgcagctcgtccagtcaggggcggaggtcaagaaaccaggagagtcagtaaagatctcgtgcaaagcgtc
gggatatacctttacaaactacggcatgaattgggtgcgacaagcacccggccagggcctgaagtggatggggt
ggatcaatacatatactggggagtccacttatgccgacgacttcaagggaaggtttgccttctccctggatacg
tcggcgtcgaccgcttatttgcagttgagctcgctgaggtcggaagatacagcagtgtacttctgcgctcgctt
cgcaatcaaaggggattactggggtcaggggacgcttgtaaccgtgtcctcagcgtcgacgggtggtggtgggt
cgggaggtggtggtagcggaggtggagggtcgggtggaggcggatcagatattgtgatgacacaatcgccgctc
tcactgcccgtaacgcccggagagcccgcgtcaatttcatgtcggtcgacaaagtcactccttcactcggacgg
gattacgtacctctattggtatcttcaaaagccgggtcagtcacctcaactcctcatctaccagatgtcgaact
tggcatcaggggtccctgatcgcttctcgtccagcgggtccgggacggactttaccttgaaaatctcaagagtg
gaggccgaggacgaaggggtctactactgtgcccagaaccttgaaattccgcggacgtttggaggagggacaaa
gctggagatcaaaagaacttgataa
>Anti-EpCAM scFv-v9 aa
(SEQ ID NO: 476)
QVQLQQSGGGLVKPGESVKISCAASGYTFTNYGMNWVKQAPGKGLKWMGWINTYTGESTYADDFKGRFTFSLET
SASAAYLQINSLRPEDTAVYFCARFAIKGDYWGQGTTVTVSSASTGGGGSGGGGSGGGGSGGGGSGDIVMTQSP
SSLSASVGDKATITCRSTKSLLHSNGITYLYWYLQKPGKAPKLLIYQMSNLASGVPDRFSSSGSGTEFTLTISS
VQPEDEGTYYCAQNLEIPRTFGQGTKLEIK**
>Anti-EpCAM scFv-v9 nt
(SEQ ID NO: 477)
caggtacaactccagcaatcaggaggcgggcttgtaaaacccggggagtcggtgaagatcagctgtgcagcatc
agggtacacattcacaaactatggcatgaactgggtcaaacaggcgccagggaaggggctgaaatggatgggct
ggatcaatacgtacactggtgagagcacatacgcggatgatttcaaagggcggtttacgttttcactcgaaacg
tcggcgtccgccgcatatcttcaaatcaattccttgaggccggaggacacagcagtctacttctgcgcccgatt
tgccattaagggtgattattggggccagggaaccacggtgactgtcagctccgcttcgacaggaggaggaggga
gcggtggaggaggatcgggaggtggagggtcgggtggtggtgggtcaggagacattgtgatgacccagtcgccc
tcgtcgctttcagcgagcgtcggggacaaggcgaccattacttgtcgctcaactaagtcgttgctgcactccaa
cgggatcacgtacctctattggtatctccaaaaacctggtaaagcgcctaagctcctgatctaccagatgtcca
atttggcgtcgggagtaccggacagattttcaagctccggatcagggactgagttcacacttacgattagctcc
gtgcagcccgaggatgaagggacctattactgcgcccagaacttggaaatcccgagaaccttcggacagggtac
gaagctggaaatcaagtgataa
>Anti-EpCAM scFv-v10 aa
(SEQ ID NO: 478)
QVQLQQSGGGLVKPGESVKISCAASGYTFTNYGMNWVKQAPGKGLKWMGWINTYTGESTYADDFKGRFTFSLET
SASAAYLQINSLRPEDTAVYFCARFAIKGDYWGQGTTVTVSSASTGGGGSGGGGSGGGGSGGGGSGDIVMTQSP
SSLSASVGDKATITCRSTKSLLHSDGITYLYWYLQKPGKAPKLLIYQLSNLASGVPDRFSSSGSG
                                                            * *
TEFTLTISSVQPEDEGTYYCAQNLEIPRTFGQGTKLEIK**
>Anti-EpCAM scFv-v10 nt
(SEQ ID NO: 479)
caggtccagttgcaacagtccggaggtgggcttgtgaaacccggggagtcggtgaagatctcatgcgcggcttc
ggggtacacgttcacaaactacgggatgaattgggtcaagcaggcacccgggaaggggttgaaatggatgggtt
ggatcaatacatacactggggagagcacgtatgcagatgacttcaaaggacgctttaccttcagcctcgaaacg
agcgcctcagccgcatacctccaaatcaatagcctccggccagaagatactgcggtgtatttctgcgctaggtt
cgccattaaaggggactattggggacaggggacgacggtgacggtatcatcagcgtcgactggtggaggcggct
ccggaggaggtgggtccggcggtggcgggtcaggtggtggtggctcgggagatattgtaatgacacagtccccg
tcctccctctccgcgagcgtgggagataaggccacgattacatgtcgaagcaccaaatcgctccttcactcgga
cggaatcacatatttgtattggtacttgcaaaaaccggggaaggcgcctaagctgctgatctaccagctttcga
acctggcgtcaggggtccctgaccggttttcgtcgtcgggaagcgggaccgagtttacacttacgatctcgtca
gtacagcccgaggacgaaggaacatactattgcgcccagaacttggagattccgagaacttttggccagggaac
caagctcgaaatcaagtgataa
>Anti-EpCAM scFv-v11 aa
(SEQ ID NO: 480)
DIVMTQSPSSLSASVGDKATITCRSTKSLLHSNGITYLYWYLQKPGKAPKLLIYQMSNLASGVPDRFSSSGSGT
EFTLTISSVQPEDEGTYYCAQNLEIPRTFGQGTKLEIKRTGGGGSGGGGSGGGGSGGGGSGQVQLQQSGGGLVK
PGESVKISCAASGYTFTNYGMNWVKQAPGKGLKWMGWINTYTGESTYADDFKGRFTFSLETSASAAYLQINSLR
PEDTAVYFCARFAIKGDYWGQGTTVTVSS**
>Anti-EpCAM scFv-v11 nt
(SEQ ID NO: 481)
gacatcgtcatgacccagtcaccgtcctcactgtcggcgtcggtgggtgataaggccacaattacatgccgcag
cacgaaatcactgctccactccaatgggattacatatctctattggtatctccaaaaacccggaaaggcaccta
agttgctgatctaccagatgtcgaacttggcatcgggagtacccgataggttctcgtcgtcgggaagcggcacg
gagttcacgctcaccatttcctcagtccagccggaggacgaaggaacttactactgcgctcagaatcttgaaat
cccgcgcacatttggacaagggacgaaacttgaaatcaagcgaactggaggaggtgggtcaggcggaggtggga
gcggcggaggcggatcgggtggtggagggtcgggacaggtacagttgcagcagtcgggaggcgggctggtaaaa
cctggtgaaagcgtcaagatctcatgtgcagcctcagggtatacgttcaccaattacgggatgaactgggtgaa
gcaggcgccagggaaaggtcttaagtggatgggatggatcaacacttacacgggagagtccacatacgcggatg
actttaaggggcggttcacgttttcgttggagacttcagcgtccgctgcctacctccaaatcaactcccttaga
cccgaggacacagcggtctatttctgtgcgcggtttgccattaaaggtgattattggggacagggtacgactgt
gaccgtgtccagctgataa
>Anti-EpCAM scFv-v12 aa
(SEQ ID NO: 482)
DIVMTQSPSSLSASVGDKATITCRSTKSLLHSDGITYLYWYLQKPGKAPKLLIYQLSNLASGVPDRFSSSG
SGTEFTLTISSVQPEDEGTYYCAQNLEIPRTFGQGTKLEIKRTGGGGSGGGGSGGGGSGGGGSGQVQLQQSGGG
LVKPGESVKISCAASGYTFTNYGMNWVKQAPGKGLKWMGWINTYTGESTYADDFKGRFTFSLETSASAAYLQIN
SLRPEDTAVYFCARFAIKGDYWGQGTTVTVSS
>Anti-EpCAM scFv-v12 nt
(SEQ ID NO: 483)
gacatcgtcatgacccagtcaccgtcctcactgtcggcgtcggtgggtgataaggccacaattacatgccgcag
cacgaaatcactgctccactccgacgggattacatatctctattggtatctccaaaaacccggaaaggcaccta
agttgctgatctaccagttgtcgaacttggcatcgggagtacccgataggttctcgtcgtcgggaagcggcacg
gagttcacgctcaccatttcctcagtccagccggaggacgaaggaacttactactgcgctcagaatcttgaaat
cccgcgcacatttggacaagggacgaaacttgaaatcaagcgaactggaggaggtgggtcaggcggaggtggga
gcggcggaggcggatcgggtggtggagggtcgggacaggtacagttgcagcagtcgggaggcgggctggtaaaa
cctggtgaaagcgtcaagatctcatgtgcagcctcagggtatacgttcaccaattacgggatgaactgggtgaa
gcaggcgccagggaaaggtcttaagtggatgggatggatcaacacttacacgggagagtccacatacgcggatg
actttaaggggcggttcacgttttcgttggagacttcagcgtccgctgcctacctccaaatcaactcccttaga
cccgaggacacagcggtctatttctgtgcgcggtttgccattaaaggtgattattggggacagggtacgactgt
gaccgtgtccagctgataa
>Anti-EpCAM scFv-v13 aa
(SEQ ID NO: 484)
DIVMTQSPSSLSASVGDKATITCRSTKSLLHSNGITYLYWYLQKPGKAPKLLIYQMSNLASGVPDRFSSSGSGT
EFTLTISSVQPEDEGTYYCAQNLEIPRTFGQGTKLEIKRTPSHNSHQVPSAGGPTANSGTSGSQVQLQQSGGGL
VKPGESVKISCAASGYTFTNYGMNWVKQAPGKGLKWMGWINTYTGESTYADDFKGRFTFSLETSASAAYLQINS
LRPEDTAVYFCARFAIKGDYWGQGTTVTVSS
>Anti-EpCAM scFv-v13 nt
(SEQ ID NO: 485)
gacatcgtcatgacccagtcaccgtcctcactgtcggcgtcggtgggtgataaggccacaattacatgccgcag
cacgaaatcactgctccactccaatgggattacatatctctattggtatctccaaaaacccggaaaggcaccta
agttgctgatctaccagatgtcgaacttggcatcgggagtacccgataggttctcgtcgtcgggaagcggcacg
gagttcacgctcaccatttcctcagtccagccggaggacgaaggaacttactactgcgctcagaatcttgaaat
cccgcgcacatttggacaagggacgaaacttgaaatcaagcgaactccgtcccacaacagccatcaagtgccct
cggcgggagggcccaccgccaattcggggacatcagggagccaggtacagttgcagcagtcgggaggcgggctg
gtaaaacctggtgaaagcgtcaagatctcatgtgcagcctcagggtatacgttcaccaattacgggatgaactg
ggtgaagcaggcgccagggaaaggtcttaagtggatgggatggatcaacacttacacgggagagtccacatacg
cggatgactttaaggggcggttcacgttttcgttggagacttcagcgtccgctgcctacctccaaatcaactcc
cttagacccgaggacacagcggtctatttctgtgcgcggtttgccattaaaggtgattattggggacagggtac
gactgtgaccgtgtccagctgataa
>Murine anti-epCAM-LC
(SEQ ID NO: 486)
DIVMTQSAFS NPVTLGTSAS ISCRSTKSLL HSNGITYLYW YLQKPGQSPQ LLIYQMSNLA
SGVPDRFSSS GSGTDFTLRI SRVEAEDVGV YYCAQNLEIP RTFGGGTKLE IK
>Murine anti-epCAM-HC
(SEQ ID NO: 487)
QVQLQQSGPE LKKPGETVKI SCKASGYTFT NYGMNWVKQA PGRGLKWMGW INTYTGESTY
ADDFKGRFAF SLETSASAAY LQINNLKNED TATYFCARFA IKGDYWGQGT TLTVSS
>Humanized MOC31 from WO 2000/061635
(SEQ ID NO: 488)
DIQMTQSPSSLSASVGDRVTITCRSTKSLLHSNGITYLYWYQQKPGKAPKLLIYQMSNLASGVPSRFSSSGSGT
DFTLTISSLQPEDFATYYCAQNLEIPRTFGQGTKVELKRTPSHNSHQVPSAGGPTANSGTSGSEVQLVQSGPGL
VQPGGSVRISCAASGYTFTNYGMNWVKQAPGKGLEWMGWINTYTGESTYADSFKGRFTFSLDTSASAAYLQINS
LRAEDTAVYYCARFAIKGDYWGQGTLLTVSS
>TFcBA large chain complete
(SEQ ID NO: 489)
QLQLQESGPGLVKPSETLSLTCTVSGGSISSSVYYWSWIRQPPGKGLEWIGVIYPSGNTYYSPSLKSRVTISVD
TSKNQFSLKLSSVTAADTAVYYCARTIYDLFDIWGQGTMVTVSSASTKGPSVFPLAPSSKSTSGGTAALGCLVK
DYFPEPVTVSWNSGALTSGVHTFPAVLQSSGLYSLSSVVTVPSSSLGTQTYICNVNHKPSNTKVDKKVEPKSCD
KTHTCPSCPAPEFLGGPSVFLFPPKPKDTLMISRTPEVTCVVVDVSQEDPEVQFNWYVDGVEVHNAKTKPREEQ
FNSKYRVVSVLTVLHQDWLNGKEYKCKVSNKGLPSSIEKTISKAKGQPREPQVYTLPPSREEMTKNQVSLSCAV
KGFYPSDIAVEWESNGQPENNYKTTPPVLDSDGSFFLVSKLTVDKSRWQQGNVFSCSVMHEALHNHYTQKSLSL
SKSCDKTGGGGSGGGGSGGGGSGGGGSGGGGSGGGGSGGGGSGGGGSCPSCPAPEFLGGPSVFLFPPKPKDTLM
ISRTPEVTCVVVDVSQEDPEVQFNWYVDGVEVHNAKTKPREEQFNSDYRVVSVLTVLHQDWLNGKEYKCKVSNK
GLPSSIEKTISKAKGQPREPQVYTLPPSREEMTKNQVSLWCLVKGFYPSDIAVEWESNGQPENNYKTTPPVLDS
DGSFFLYSKLTVDKSRWQQGNVFSCSVMHEALHNHYTQKSLSLSGECGGGGSGGGGSDIVMTQSPLSLPVTPGE
PASISCRSTKSLLHSDGITYLYWYLQKPGQSPQLLIYQLSNLASGVPDRFSSSGSGTDFTLKISRVEAEDEGVY
YCAQNLEIPRTFGCGTKLEIKRTGGGGSGGGGSGGGGSDIQMTQSPSSLSASVGDRVTITCRSTKSLLHSNGIT
YLYWYQQKPGKAPKLLIYQMSNLASGVPSRFSSSGSGTDFTLTISSLQPEDFATYYCAQNLEIPRTFGQGTKVE
LKRTPSHNSHQVPSAGGPTANSGTSGSEVQLVQSGPGLVQPGGSVRISCAASGYTFTNYGMNWVKQAPGKGLEW
MGWINTYTGESTYADSFKGRFTFSLDTSASAAYLQINSLRAEDTAVYYCARFAIKGDYWGQGTLLTVSS
```

### Example A-14

### TFcBAs

[0778] In certain embodiments, bispecific antibodies (anti-cMet/anti-EpCAM) are provided. In such embodiments, the bispecific antibodies comprise an Fab portion wherein there is a binding site with specificity for c-Met and an scFv portion wherein there is a binding site with specificity for EpCAM.

[0779] In a particular embodiment, we introduced certain stabilizing features in the scFv: (1) removal of a potential de-amidation (NG) site from CDRL1 and replaced it with DG; (2) removal of a potential methionine oxidation site from CDRL2 and replaced it with Leucine; (3) introduction of a disulfide bridge to further stabilize the VH-VL interface.

### Further Examples

### Section B

### Example B-1

### Quantitative Flow Cytometry Assessment of Cell Surface Expression of Bispecific Antibody Antigens

[0780] For measurements of cell surface expression of, e.g., cMet, ErbB1, ErbB2, EpCAM, CD44, and CEA levels, quantitative flow cytometry is performed using the Quantum Simply Cellular kit (Bangs Laboratories).

[0781] Cells are grown in exponential phase using standard cell culture media containing 10% FBS, and are passaged at least twice before the start of the experiment. On the day of the experiment, cells are visually assessed under a microscope to confirm between 60% and 80% confluence. Cells are detached from the culture plate by addition of 0.05% trypsin-EDTA (Gibco), and once a majority of cells are detached (as assessed visually by microscope) the trypsin is inactivated using cell culture media containing 10% FBS. The cells are centrifuged at 500 g, resuspended in flow cytometry buffer (2% FBS+0.1% sodium azide in PBS), and seeded at a density of 50,000 cells per well in a 96-well plate (BD Biosciences, catalog #62406-015).

[0782] In a separate 96-well plate, 2 drops of Quantum Simply Cellular anti-mouse IgG coated beads (Bangs Laboratories, catalog #815) or anti-human IgG coated beads (Bangs Laboratories, catalog #816) are added per well. Each bead kit contains 5 bead populations (1 blank and 4 beads with increasing levels of Fc-specific capture antibody). Each coated population binds a specific number of monoclonal antibodies of the appropriate species (the “ABC” value), and thus serves as a standard curve for quantification when beads are labeled to saturation with the same monoclonal antibody that is used to label cell surface protein.

[0783] Antibodies against the cell surface targets are given in Table B-1. For antibodies against c-Met, ErbB1, ErbB2, and CEA, conjugation with Alexa Fluor 647 (Life Technologies, catalog #A-20006) is done according to manufacturer's instructions. Antibodies against EpCAM and CD44 are available pre-conjugated with APC.

TABLE B-1

| Target | Antibody | Source |
|---|---|---|
| c-Met | 224G11-TH7-Hz3 | United States patent application 2011/ |
| | | 0097262: SEQ ID NO 4 (V_{H} domain), |
| | | 10 (V_{L} domain), and 28 (hinge region) |
| ErbB1 | cetuximab | Bristol-Myers Squibb/Eli Lilly |
| ErbB2 | trastuzumab | Genentech |
| EpCAM | EpCAM APC clone | BD Biosciences, catalog #347200 |
| | EBA-1 | |
| CD44 | clone G44-26 APC | BD Biosciences, catalog #559942 |
| CEA | clone B6.2 | BD Biosciences, catalog #551355 |

[0784] The appropriate fluorophore-conjugated antibody is added to the cells and the beads (200 nM antibody concentration in 80 μl of flow cytometry buffer). Antibody is allowed to incubate for 30 minutes at 4° C. The plates are centrifuged and washed twice with 100 μL of ice-cold flow cytometry buffer. After the last wash, the cells and beads are centrifuged and resuspended in 100 μL of ice-cold flow cytometry buffer and read using the appropriate fluorescence filter on a flow cytometer (BD FACSCanto). Channel values for the bead populations are recorded in the bead lot-specific QuickCal template provided in the Quantum Simply Cellular kit. A regression is performed that relates fluorescence signal to the beads' ABC values. ABC values are assigned to stained cell samples using this standard curve. If monovalent antibody-to-cell surface receptor binding is presumed, then the ABC value equals the number of surface receptors.

[0785] Table B-2 lists cell surface expression levels in a panel of cell lines derived from colorectal, ovarian, lung, breast, brain, gastric, prostate, and pancreatic cancers measured using the above protocol. Table B-3 lists the ratio of expression between the various cell surface targets and c-Met. It can be seen that EpCAM has the highest median expression level of any measured target, and also the highest median expression ratio relative to c-Met, supporting the selection of EpCAM as a targeting moiety for potent bispecific antibody binding of c-Met.

[0786] In the following 2 Tables, the Tumor Types are indicated as follows: 1=colorectal, 2=ovarian, 3=non-small cell lung, 4=renal, 5=breast, 6=glioma, 7=triple-negative breast, 8=gastric, 9=epidermoid, 10=prostate, and 11=pancreatic. Cell lines indicated are commercially available, e.g., from ATCC.

TABLE B-2

| | Tumor | c-Met | ErbB1 | ErbB2 | EpCAM | CD44 | CEA |
|---|---|---|---|---|---|---|---|
| Cell Line | Type | (#/cell) | (#/cell) | (#/cell) | (#/cell) | (#/cell) | (#/cell) |
| HCC2998 | 1 | 8.6E+04 | 1.4E+05 | 8.6E+04 | 2.5E+06 | 5.6E+04 | 2.2E+05 |
| IGROV-1 | 2 | 1.3E+05 | 1.8E+05 | 1.5E+05 | 9.3E+02 | 1.3E+04 | 3.9E+04 |
| SW620 | 1 | 8.7E+04 | 9.9E+03 | 2.3E+04 | 1.7E+06 | 1.2E+03 | 3.0E+04 |
| H441 | 3 | 3.2E+05 | 6.6E+05 | 1.0E+05 | 2.5E+06 | 2.4E+02 | 2.7E+05 |
| ACHN | 4 | 1.3E+05 | 7.8E+05 | 5.0E+04 | 4.6E+05 | 6.4E+06 | 3.6E+04 |
| HT-29 | 1 | 9.6E+04 | 2.2E+05 | 8.6E+04 | 2.5E+06 | 9.3E+05 | 6.8E+04 |
| HCC1954 | 5 | 1.3E+05 | 2.9E+05 | 8.0E+05 | 2.4E+06 | 1.4E+06 | 4.6E+06 |
| A549 | 3 | 7.2E+04 | 3.2E+05 | 5.0E+04 | 2.4E+04 | 4.8E+06 | 3.2E+04 |
| U87 | 6 | 3.2E+04 | 2.0E+05 | 1.0E+04 | 4.0E+02 | 4.9E+06 | 1.0E+04 |
| HCT-15 | 1 | 2.3E+04 | 1.4E+05 | 6.1E+04 | 2.1E+06 | 4.0E+03 | 1.3E+04 |
| MKN45 | 8 | 1.7E+05 | 1.6E+05 | 1.0E+05 | 1.8E+06 | 3.1E+05 | 1.3E+07 |
| colo205 | 1 | 2.9E+04 | 1.0E+05 | 1.5E+05 | 2.1E+06 | 1.7E+05 | 7.4E+03 |
| U251 | 6 | 7.4E+04 | 2.9E+05 | 2.9E+04 | 2.0E+02 | 4.1E+06 | 1.7E+04 |
| HCC827 | 3 | 2.1E+05 | 1.1E+06 | 9.3E+04 | 2.1E+06 | 1.9E+05 | 8.8E+05 |
| EKVX | 3 | 4.8E+04 | 3.6E+05 | 1.1E+05 | 1.7E+04 | 2.3E+06 | 1.0E+04 |
| H1975 | 3 | 8.1E+04 | 1.5E+05 | 6.4E+04 | 2.1E+05 | 3.2E+06 | 3.4E+04 |
| H596 | 3 | 5.4E+04 | 1.7E+05 | 5.6E+04 | 2.1E+06 | 3.6E+05 | 1.3E+04 |
| JIMT | 7 | 3.7E+04 | 4.6E+05 | 2.8E+05 | 2.0E+06 | 1.4E+06 | 2.6E+04 |
| BT20 | 7 | 2.5E+04 | 1.3E+06 | 4.5E+05 | 2.3E+06 | 9.3E+05 | 6.7E+04 |
| MCF7 | 5 | 7.3E+03 | 8.7E+03 | 3.8E+04 | 2.6E+06 | 1.7E+05 | 2.8E+04 |
| Cal51 | 7 | 1.6E+04 | 7.1E+04 | 3.5E+04 | 1.2E+06 | 2.1E+06 | 1.4E+04 |
| Calu3 | 3 | 7.7E+04 | 3.2E+05 | 9.3E+05 | 2.6E+06 | 1.6E+06 | 2.5E+05 |
| SNU5 | 8 | 3.0E+05 | 2.5E+05 | 4.6E+05 | 1.9E+06 | 5.8E+04 | 7.2E+04 |
| H1993 | 3 | 6.1E+05 | 4.0E+05 | 6.5E+04 | 2.6E+06 | 4.9E+05 | 1.6E+07 |
| A431 | 9 | 2.4E+04 | 1.6E+06 | 1.5E+05 | 1.5E+06 | 1.1E+06 | 2.3E+05 |
| SkBr3 | 5 | 3.3E+04 | 3.4E+05 | 1.2E+06 | 3.0E+06 | 3.3E+03 | 1.4E+05 |
| NCI- | 3 | 5.8E+04 | 5.4E+04 | 1.2E+06 | 3.9E+06 | 1.4E+04 | 1.0E+07 |
| H2170 | | | | | | | |
| PC3 | 10 | 1.2E+05 | 3.1E+05 | 6.9E+04 | 7.9E+04 | 2.7E+06 | 6.9E+04 |
| H1299 | 3 | 7.4E+04 | 3.0E+05 | 5.6E+04 | 1.2E+03 | 4.3E+06 | 7.4E+04 |
| H1703 | 3 | 3.4E+04 | 5.3E+05 | 8.3E+04 | 1.2E+03 | 4.7E+02 | 3.2E+04 |
| MDA-MB | 5 | 9.2E+04 | 3.5E+05 | 5.1E+04 | 3.1E+04 | 5.2E+06 | 6.1E+04 |
| 231 | | | | | | | |
| BxPC3 | 11 | 1.2E+05 | 9.2E+05 | 6.6E+04 | 7.1E+05 | 5.9E+05 | 1.0E+07 |
| Cal120 | 7 | 1.3E+05 | 8.4E+05 | 1.1E+05 | 1.1E+05 | 2.1E+07 | 1.0E+06 |
| H2347 | 3 | 5.4E+05 | 9.6E+05 | 2.3E+05 | 9.2E+06 | 7.0E+05 | 6.0E+06 |
| OVCAR8 | 2 | 1.1E+05 | 7.7E+05 | 1.0E+05 | 3.4E+05 | 1.2E+07 | 8.2E+05 |
| SkOV3 | 2 | 1.6E+05 | 6.9E+05 | 2.6E+06 | 3.2E+05 | 1.1E+07 | 5.8E+05 |
| MDAMB- | 5 | 2.9E+04 | 5.1E+04 | 1.4E+06 | 7.5E+06 | 1.5E+03 | 4.2E+05 |
| 453 | | | | | | | |
| BT474-M3 | 5 | 4.2E+04 | 2.1E+05 | 2.7E+06 | 9.2E+06 | 1.4E+03 | 4.2E+07 |
| BT549 | 5 | 2.3E+05 | 1.8E+06 | 1.3E+05 | 7.4E+03 | 2.3E+07 | 1.5E+06 |
| OVCAR3 | 2 | 1.3E+05 | 9.5E+05 | 1.7E+05 | 9.2E+06 | 4.9E+04 | 1.0E+06 |
| OVCAR-4 | 2 | 4.9E+04 | 3.3E+05 | 1.1E+05 | 2.6E+06 | 1.7E+05 | 3.1E+05 |
| OVCAR-5 | 2 | 5.5E+04 | 8.0E+05 | 9.1E+04 | 2.0E+06 | 9.9E+04 | 3.5E+06 |
| H522 | 3 | 3.1E+04 | 5.4E+04 | 1.1E+05 | 2.6E+03 | 1.1E+03 | 2.8E+05 |
| CaOV3 | 2 | 1.0E+05 | 6.3E+05 | 1.0E+05 | 2.6E+06 | 1.7E+05 | 4.9E+05 |
| SW-626 | 2 | 2.0E+05 | 4.2E+05 | 1.0E+05 | 2.6E+06 | 1.2E+05 | 4.5E+05 |
| HCT116 | 1 | 7.5E+04 | 2.1E+05 | 5.5E+04 | 2.6E+06 | 5.3E+05 | 2.1E+05 |
| HCT-8 | 1 | 4.3E+04 | 2.2E+05 | 6.2E+04 | 2.6E+06 | 6.7E+04 | 2.4E+05 |
| KM-12 | 1 | 4.0E+04 | 8.5E+04 | 6.0E+04 | 2.6E+06 | 7.2E+05 | 4.1E+05 |
| H-23 | 3 | 7.4E+04 | 2.8E+05 | 5.2E+04 | 1.6E+04 | 1.7E+06 | 5.5E+05 |
| OV-90 | 2 | 6.6E+04 | 9.8E+04 | 6.4E+04 | 2.4E+06 | 3.2E+06 | 2.2E+06 |
| OVCA- | 2 | 1.7E+05 | 6.9E+05 | 8.4E+04 | 2.4E+06 | 9.6E+05 | 5.6E+05 |
| 433 | | | | | | | |
| TOV- | 2 | 2.1E+04 | 3.2E+04 | 7.7E+04 | 2.4E+03 | 0.0E+00 | 1.6E+05 |
| 112D | | | | | | | |
| LoVo | 1 | 3.8E+04 | 1.6E+05 | 4.9E+04 | 2.4E+06 | 3.4E+05 | 3.0E+05 |
| LS174T | 1 | 3.4E+04 | 1.1E+05 | 7.3E+04 | 2.4E+06 | 4.6E+05 | 5.1E+05 |
| ADRr | 5 | 4.2E+04 | 2.9E+05 | 6.1E+04 | 2.0E+05 | 2.9E+06 | 2.4E+05 |
| DU145 | 10 | 4.0E+04 | 3.9E+05 | 5.8E+04 | 4.5E+05 | 2.0E+06 | 3.4E+05 |
| | Median | 7.4E+04 | 3.0E+05 | 8.6E+04 | 2.1E+06 | 5.9E+05 | 2.5E+05 |

TABLE B-3

| | Tumor | ErbB1/ | ErbB2/ | EpCAM/ | CD44/ | CEA/ |
|---|---|---|---|---|---|---|
| Cell Line | Type | c-Met | c-Met | c-Met | c-Met | c-Met |
| HCC2998 | 1 | 1.6 | 1.0 | 29.1 | 0.7 | 2.6 |
| IGROV-1 | 2 | 1.4 | 1.2 | 0.0 | 0.1 | 0.3 |
| SW620 | 1 | 0.1 | 0.3 | 19.5 | 0.0 | 0.3 |
| H441 | 3 | 2.1 | 0.3 | 7.8 | 0.0 | 0.8 |
| ACHN | 4 | 6.0 | 0.4 | 3.5 | 49.2 | 0.3 |
| HT-29 | 1 | 2.3 | 0.9 | 26.0 | 9.7 | 0.7 |
| HCC1954 | 5 | 2.2 | 6.2 | 18.5 | 10.8 | 35.4 |
| A549 | 3 | 4.4 | 0.7 | 0.3 | 66.7 | 0.4 |
| U87 | 6 | 6.3 | 0.3 | 0.0 | 153.1 | 0.3 |
| HCT-15 | 1 | 6.1 | 2.7 | 91.3 | 0.2 | 0.6 |
| MKN45 | 8 | 0.9 | 0.6 | 10.6 | 1.8 | 76.5 |
| colo205 | 1 | 3.4 | 5.2 | 72.4 | 5.9 | 0.3 |
| U251 | 6 | 3.9 | 0.4 | 0.0 | 55.4 | 0.2 |
| HCC827 | 3 | 5.2 | 0.4 | 10.0 | 0.9 | 4.2 |
| EKVX | 3 | 7.5 | 2.3 | 0.4 | 47.9 | 0.2 |
| H1975 | 3 | 1.9 | 0.8 | 2.6 | 39.5 | 0.4 |
| H596 | 3 | 3.1 | 1.0 | 38.9 | 6.7 | 0.2 |
| JIMT | 7 | 12.4 | 7.6 | 54.1 | 37.8 | 0.7 |
| BT20 | 7 | 52.0 | 18.0 | 92.0 | 37.2 | 2.7 |
| MCF7 | 5 | 1.2 | 5.2 | 356.2 | 23.3 | 3.8 |
| Cal51 | 7 | 4.4 | 2.2 | 75.0 | 131.3 | 0.9 |
| Calu3 | 3 | 4.2 | 12.1 | 33.8 | 20.8 | 3.2 |
| SNU5 | 8 | 0.8 | 1.5 | 6.3 | 0.2 | 0.2 |
| H1993 | 3 | 0.7 | 0.1 | 4.3 | 0.8 | 26.2 |
| A431 | 9 | 66.7 | 6.3 | 62.5 | 45.8 | 9.6 |
| SkBr3 | 5 | 10.3 | 36.4 | 90.9 | 0.1 | 4.2 |
| NCI-H2170 | 3 | 0.9 | 20.7 | 67.2 | 0.2 | 172.4 |
| PC3 | 10 | 2.6 | 0.6 | 0.7 | 22.5 | 0.6 |
| H1299 | 3 | 4.1 | 0.8 | 0.0 | 58.1 | 1.0 |
| H1703 | 3 | 15.6 | 2.4 | 0.0 | 0.0 | 0.9 |
| MDA- | 5 | 3.8 | 0.6 | 0.3 | 56.5 | 0.7 |
| MB 231 | | | | | | |
| BxPC3 | 11 | 7.7 | 0.6 | 5.9 | 4.9 | 83.3 |
| Cal120 | 7 | 6.5 | 0.8 | 0.8 | 161.5 | 7.7 |
| H2347 | 3 | 1.8 | 0.4 | 17.0 | 1.3 | 11.1 |
| OVCAR8 | 2 | 7.0 | 0.9 | 3.1 | 109.1 | 7.5 |
| SkOV3 | 2 | 4.3 | 16.3 | 2.0 | 68.8 | 3.6 |
| MDAMB- | 5 | 1.8 | 48.3 | 258.6 | 0.1 | 14.5 |
| 453 | | | | | | |
| BT474-M3 | 5 | 5.0 | 64.3 | 219.0 | 0.0 | 1000.0 |
| BT549 | 5 | 7.8 | 0.6 | 0.0 | 100.0 | 6.5 |
| OVCAR3 | 2 | 7.3 | 1.3 | 70.8 | 0.4 | 7.7 |
| OVCAR-4 | 2 | 6.7 | 2.2 | 53.1 | 3.5 | 6.3 |
| OVCAR-5 | 2 | 14.5 | 1.7 | 36.4 | 1.8 | 63.6 |
| H522 | 3 | 1.7 | 3.5 | 0.1 | 0.0 | 9.0 |
| CaOV3 | 2 | 6.3 | 1.0 | 26.0 | 1.7 | 4.9 |
| SW-626 | 2 | 2.1 | 0.5 | 13.0 | 0.6 | 2.3 |
| HCT116 | 1 | 2.8 | 0.7 | 34.7 | 7.1 | 2.8 |
| HCT-8 | 1 | 5.1 | 1.4 | 60.5 | 1.6 | 5.6 |
| KM-12 | 1 | 2.1 | 1.5 | 65.0 | 18.0 | 10.3 |
| H-23 | 3 | 3.8 | 0.7 | 0.2 | 23.0 | 7.4 |
| OV-90 | 2 | 1.5 | 1.0 | 36.4 | 48.5 | 33.3 |
| OVCA-433 | 2 | 4.1 | 0.5 | 14.1 | 5.6 | 3.3 |
| TOV-112D | 2 | 1.5 | 3.7 | 0.1 | 0.0 | 7.6 |
| LoVo | 1 | 4.2 | 1.3 | 63.2 | 8.9 | 7.9 |
| LS174T | 1 | 3.2 | 2.1 | 70.6 | 13.5 | 15.0 |
| ADRr | 5 | 6.9 | 1.5 | 4.8 | 69.0 | 5.7 |
| DU145 | 10 | 9.8 | 1.5 | 11.3 | 50.0 | 8.5 |
| | Median | 4.1 | 1.2 | 14.1 | 7.1 | 3.8 |
| | ratio | | | | | |

### Example B-2

### Dose-Response Analysis of Antibody Activity on U-87 MG Tumors Implanted into Nude Mice

[0787] The in vivo activity of Ab#7 can be further explored in the U-87 autocrine HGF model through an experiment testing the response of U-87 MG tumors to different doses of antibody. The dose-response evaluation can proceed according to the protocol described in Example A-12, except that drug is dosed every seven days. The following groups are treated:

[0788] (1) PBS control

[0789] (2) Ab#7, approximately 24 mg/kg based on individual mouse body weight

[0790] (3) Ab#7, approximately 12 mg/kg

[0791] (4) Ab#7, approximately 4 mg/kg

[0792] (5) Ab#7, approximately 1 mg/kg

[0793] Data from a representative experiment conducted using the above protocol are shown in FIG. 32. Treatment with Ab#7 resulted in growth stasis of subcutaneously implanted U-87 MG tumors at the 1 mg/kg dosing level, and tumor regression at the 4 mg/kg, 12 mg/kg, and 24 mg/kg dosing levels. A dose level of equal to or higher than 12 mg/kg, given every seven days, had maximal anti-tumor activity in this experiment.

### Example B-3

### Creation of NCI-H358 Cell Line Variant that Secretes Human HGF (H358-HGF Cells)

[0794] Transfection of a human HGF transgene into NCI-H358 lung cancer cells (ATCC CRL-5807) may be performed using lentiviral particles (GeneCopoeia catalog #LP-A0820-Lv105-0200) according to the following protocol. NCI-H358 cells grown using standard cell culture medium supplemented with 10% fetal bovine serum (FBS) are trypsinized, counted, and seeded at a density of 10,000 cells per well in a 96-well plate, using a final volume of 100 μl. Three μl of lentiviral particles are added per well. The plate is spun in a centrifuge at 2000 rpm for 2 hours at 37° C., and then removed from the centrifuge and placed in a 37° C. incubator for 4 days. After 4 days, the media is aspirated and replaced with fresh growth media without lentivirus. After 24 hours of further incubation, the cells are trypsinized and transferred to a 24-well plate. After growth to 80% confluence, the cells are again trypsinized and transferred to a 6-well plate. After growth to 80% confluence, the media is aspirated and replaced with media containing puromycin selection antibiotic at a final concentration of 1 μg/ml. Cells are regrown in selection media until 80% confluence, after which the cells are trypsinized and pooled for expansion and later use.

### Example B-4

### Luminex-Based Quantification of HGF Secretion in H358-HGF Cell Line

[0795] The secretion of human HGF from cell lines may be measured using a bead-based sandwich immunoassay system (Luminex) coupled to anti-HGF antibody (R&D Systems, catalog #DY294), as described below. Preparation of beads may be performed as follows. Bio-Plex COOH beads (Bio-Rad, catalog #171-506052) are vortexed for 30 seconds, followed by bath-based sonication for an additional 30 seconds. Place 100 μl of beads into an Eppendorf tube and centrifuge at 12,000 RPM for 4 minutes. After removal of the supernatant, add 100 μl of bead wash buffer (Bio-Rad Bio-Plex Amine Coupling Kit, catalog #171-406001). Vortex and sonicate the Eppendorf tube for 10 seconds each, followed by additional centrifugation at 12,000 RPM for 4 minutes. After removal of the supernatant, resuspend the bead pellet in 80 μl of bead activation buffer (Bio-Rad Bio-Plex Amine Coupling Kit, catalog #171-406001). Vortex and sonicate the Eppendorf tube for 30 seconds each.

[0796] Immediately before use prepare 50 mg/ml solutions of both EDC carboxyl/amine crosslinker (Thermo Scientific, catalog #22980) and Sulfo-NHS ester conversion reagent (Thermo Scientific, catalog #24510). Add 10 μl of EDC solution to the Eppendorf tube, followed by 10 μl of sulfo-NHS solution. Vortex the Eppendorf for 30 seconds, cover the tube with aluminum foil to protect from light, and agitate the beads in a rotator for 20 minutes at room temperature. Add 150 μl of PBS, vortex the activated beads for 10 seconds, and then centrifuge at 12,000 RPM for 4 minutes. Remove the supernatant, and wash twice with 500 μl of PBS. Resuspend the activated beads in 100 μl antibody (1 mg/ml), followed by rotation for 2 hours at room temperature protected from light. A magnet is used to pellet the beads, so that the buffer can be removed carefully without disrupting the beads. Next, resuspend the beads in 1 ml of PBS-TBN (PBS, 0.1% BSA, 0.02% Tween-20, 0.05% Azide, pH 7.4) so that they can be stored at 4° C. in the dark until use.

[0797] Prior to use of the beads, centrifuge at 12,000 rpm for 4 minutes. Remove and discard the supernatant and wash with PBS one time and replace the supernatant with 250 μl blocking buffer (1% BSA in PBS). Vortex the beads gently for 15 seconds and then agitate using a rotator at room temperature for 30 minutes protected from light. Prepare standards for HGF using two-fold serial dilutions of recombinant protein starting at 5 ng/ml (R&D Systems, catalog #DY294). Add recombinant standard solutions and cell line supernatant to the beads and incubate overnight at 4° C. on a shaker protected from light. Dilute the detection antibody (R&D Systems, catalog #DY294) in streptavidin-PE in PBS+1% BSA to achieve a working solution of 0.001 mg/ml. Allow the beads to precipitate for 5 minutes on a magnetic plate at 4° C. Hold the plate containing the samples on the magnet firmly and invert the plate into a sink and gently blot to remove excess moisture. Centrifuge the plate briefly and add 200 μl of PBS containing 1% BSA to each well. Allow the beads to pellet on the magnet for 1-2 minutes protected from light. Repeat the above washing steps by holding the plate firmly to the magnet and inverting into the sink and adding PBS containing 1% BSA for a total of three washes. Add 100 μl of the prepared working solution of detection antibody per well. Shake gently for 1 hour protected from light. Upon completion of the incubation with detection antibody, repeat the wash steps a total of three times using PBS containing 1% BSA. Resuspend the samples in 100 μl PBS containing 1% BSA and read on the Luminex FlexMAP3D plate reader. All data is regressed to the standard curve generated using recombinant protein and then normalized based on the protein content of the cells used to generate the cell culture supernatant. Protein concentration for all cells can be performed per manufacturer's recommendation using the Thermo Scientific Pierce BCA Protein Assay (catalog #23225).

[0798] Using the above protocol, concentration of HGF in the supernatant of cell culture media for H358-HGF and U-87 MG cells was measured and subsequently normalized to the protein concentration of cells. The H358-HGF cells demonstrated a high level of HGF secretion relative to that of U-87 MG cells that natively express autocrine HGF (FIG. 33), whereas the parental and mock-transfected H358 cells did not express detectable HGF.

### Example B-5

### Bispecific Antibody Activity in EpCAM-Expressing Tumor Cell Lines Implanted into Nude Mice

[0799] To explore the role of tumor EpCAM expression in promoting the in vivo activity of Ab#7, the molecule can be evaluated in c-Met driven tumor models expressing EpCAM at levels significantly higher than c-Met. For HGF-ligand dependent tumor models, cell lines require autocrine secretion of human HGF, as it is known that mouse HGF does not activate human c-Met.

[0800] HCC827 cells transfected with human HGF (HCC827-HGF cells), along with mock-transfected HCC827 cells, were obtained from Dr. Jeffrey A. Engelman and were created according to the protocol described in Okamoto et al., Mol. Cancer. Ther. 9(10):2785-92. NCI-H358 cells transfected with human HGF (H358-HGF cells), and mock-transfected control cells, were created as per the protocol of Example B-3.

[0801] Quantitative flow cytometry measurements of HCC827 cell line variants demonstrated that the level of c-Met decreased in the HGF-transfected cells relative to mock-transfected parental cells (1.2×10⁵/cell versus 3.8×10⁵/cell), but that the level of EpCAM was unaffected (2.2×10⁶/cell versus 2.2×10⁶/cell).

[0802] Quantitative flow cytometry measurements of H358 cell line variants demonstrated that the level of c-Met remained constant in the HGF-transfected cells relative to mock-transfected parental cells (4.6×10⁵/cell versus 4.5×10⁵/cell), but that the level of EpCAM was increased (4.9×10⁷/cell versus 3.4×10⁷/cell).

[0803] For in vivo studies, cells are cultured in T75 flasks under a humidified atmosphere of 5% CO₂ at 37° C. in RPMI 1640 medium (Sigma, St. Louis, Mo.) supplemented with 10% fetal bovine serum (FBS). Cells are harvested by exposure to 0.25% trypsin. Cells are washed twice in phosphate-buffered saline (PBS) and resuspended in growth factor reduced Matrigel (BD Biosciences) at a 1:1 ratio in PBS. The cells are then counted with Trypan Blue (Life Technologies, catalog #15250-061) and mice are not implanted if the viability is <90%.

[0804] The in vivo activity of Ab#7 and OA-5D5 in these tumor models can be evaluated essentially as follows: Six-to-seven-week-old female Nu/Nu mice (Charles River Laboratories, Wilmington, Mass.) are injected subcutaneously with either 5×10⁶ H358-HGF cells/mouse or 5×10⁶ cells/mice HCC827-HGF using an injection volume of 200 μl PBS. Upon tumor take after injection, initial tumor volumes are measured using the following formula: (π/6)*L*W². The mice are sorted by weight to randomize the initial tumor volume range of 200±50 mm³, at which time the animals are sorted into treatment groups of eight animals per group. Mice are treated with PBS control, bispecific antibody, or OA-5D5 by intraperitoneal injection every 7 days.

[0805] The doses of the bispecific antibody correspond to approximately 1 mg/kg, 4 mg/kg, 12 mg/kg, and 24 mg/kg based on body weight, while the dose of OA-5D5 is approximately 10 mg/kg (an equal molar level with the 12 mg/kg bispecific antibody dose). Tumor measurements and body weights are determined twice weekly throughout the study. The tumor volume is determined by measuring in two directions with fine calipers and calculated using the following formula: tumor volume=((π/6)*L*W²). Plotted data of tumor size represents mean and standard error of the mean for each measurement. Upon study completion, mice are euthanized and tumors from all animals are excised, flash frozen in liquid N₂, and stored in a −80° C. freezer.

[0806] Data from a representative experiment using ligand-dependent HCC827-HGF cells in the above protocol are shown in FIG. 34. At the equimolar dosing levels of 10 mg/kg and 12 mg/kg OA-5D5 and Ab#7, respectively, the bispecific antibody had improved activity over OA-5D5. Additionally, the dose-response relationship of Ab#7 demonstrated that a dose level of equal to or higher than 12 mg/kg had maximal anti-tumor activity in this experiment. This result was in agreement to that observed in the U-87 MG model described in Example B-2.

[0807] Data from a representative experiment using ligand-dependent H358-HGF cells in the above protocol are shown in FIG. 35. At the equimolar dosing levels of 10 mg/kg and 12 mg/kg OA-5D5 and Ab#7, respectively, the bispecific antibody caused tumor regression, whereas OA-5D5 did not meaningfully slow tumor growth relative to control.

### Example B-6

### Immunoblot Analysis of c-Met and EpCAM Degradation in Cell Lysates Mediated by Bispecific Antibodies

[0808] The ability of antibodies to cause degradation of cellular c-Met and EpCAM can be assessed in cell lysate samples using immunoblotting as follows. A549, NCI-H441, and NCI-H2170 cells are grown to 70-80 percent confluence in 12-well plates with RPMI Media (GIBCO, catalog#1187-085) containing 10% Fetal Bovine Serum (Tissue Culture Biologicals, catalog#101H1), 2 mM L-Glutamine (GIBCO, catalog#25030-081), and penicillin/streptomycin (CellGro, catalog#30-002-CI).

[0809] Cells are then incubated with 100 nM of OA-5D5 or Ab#7 for 24 hours at 37° C., 5% CO₂. Upon completion of incubation, the cells are washed 2× with cold PBS and lysed in 200 μL per well of M-PER solution (VWR International, catalog #PI78505)+150 mM NaCl+protease and phosphatase inhibitor (cOmplete Protease Inhibitor Cocktail Tablet provided in EASY packs, Roche Diagnostics Corp, catalog #4693124001; PhosSTOP Phosphatase Inhibitor Cocktail Tablets, Roche Diagnostics Corp, catalog #4906837001).

[0810] Protein concentration is estimated using the Thermo Scientific Pierce BCA Protein Assay (catalog #23225) following the recommended protocol. Briefly, equal volumes of protein standards and cell lysates are incubated at a 1:20 ratio for 30 minutes at 37° C. then absorbance is measured at 562 nm. The protein concentration is estimated by regressing the standards using a linear fit and linearity of serial dilutions of the cell lysates.

[0811] For Western blot analysis, 10 μg of protein for each cell line and condition is separated via SDS-PAGE using a 10% gel. The proteins are then transferred to a PVDF membrane and blotted using total c-Met antibody (Cell Signaling, catalog #8198, 1:100 dilution), EpCAM antibody (Cell Signaling, catalog #2929, 1:100 dilution), or β-actin antibody (Cell Signaling, catalog #4970, 1:100 dilution), all used according to the manufacturer's recommendations. Goat anti-mouse IRDye 680 and goat anti-rabbit IRDye 800 (L1-COR Biosciences) were used as secondary antibodies. Immunoblots are imaged and protein levels were quantified and normalized to beta-actin levels using an Odyssey imager (L1-COR Biosciences).

[0812] As shown in FIG. 36, A549 cells (A), NCI-H441 (B and D), and NCI-H2170 cells (C and E) were grown and incubated with 100 nM of OA-5D5 or Ab#7 as described above and the relative protein concentration of c-Met (FIG. 36, A-C) or EpCAM (D-E) was measured. EpCAM was not detectable in the A549 cells in this assay. As can be seen in FIGS. 19B and 19C, incubation with Ab#7, but not OA-5D5, caused degradation of c-Met in NCI-H441 and HCI-H2170 cells. EpCAM was not degraded in the NCI-H441 or NCI-H2170 cells, regardless of antibody treatment.

### Example B-7

### Immunoblot Analysis of c-Met and EpCAM Degradation in Xenograft Tumors Mediated by Bispecific Antibodies

[0813] The ability of antibodies to cause degradation of cellular c-Met and EpCAM can be assessed in xenograft tumor samples using immunoblotting. To do this, tumor samples from end of study tumors from the experiments described in Example B-3 are surgically obtained and pulverized using the CryoPrep system (Covaris) according to manufacturer's instructions by placing samples in tissue tube pulverizing bags, flash freezing using liquid nitrogen, and dry pulverization at impact level 3. The freeze and pulverization steps are repeated 3-5 times depending on tissue size. Pulverized samples in tissue bags are inverted and flick-transferred to cryogenic vials (Corning) then weighed for final tumor weight of ˜1-2 mg per sample. The weighed samples are then lysed for 10 minutes on ice in tissue protein extraction reagent, TPER (Thermo Scientific) with supplemented with fresh protease and phosphatase inhibitor cocktail tablet (ROCHE) for a final concentration of ˜200 mg/ml per sample. Further pre-clearing centrifugation (14,000 rpm for 10 minutes) are done by using QIAshredder (QIAGEN) at 4° C. Centrifuged supernatant is removed and its total protein concentration estimated using the Thermo Scientific Pierce BCA Protein Assay (catalog #23225) per manufacturer's recommendation. Briefly, equal volumes of protein standards and cell lysates are incubated at a 1:20 ratio for 30 minutes at 37° C. then absorbance is measured at 562 nm. The protein concentration is estimated by regressing the standards using a linear fit and linearity of serial dilutions of the cell lysates.

[0814] For each immunoblot, an equal amount of total proteins are taken from individual tumor lysate samples and combined in their respective treatment groups for a total protein amount of 30 mg, which is loaded and run in 1×XT MES running buffer (BIO-RAD) on NuPAGE 4-12% Bis-Tris 10-12 well gel (Life Technology). Protein samples on the gel are transferred to nitrocellulose membrane using the iBlot gel transfer system (Invitrogen). The membrane is blocked at room temperature for 1 hour, probed with various primary antibodies overnight and secondary antibodies for one hour. All immunoblots are then washed 3× with Tris buffered Saline with Tween 20 (TTBS, Cell Signaling). Immunoblots are imaged and protein levels were quantified and normalized to beta-actin levels using an Odyssey imager (L1-COR Biosciences).

[0815] Antibodies for use in these studies include: c-Met (D1C2) XP Rabbit mAb #8198, EpCAM (D1B3) Rabbit mAb #2626, β-Actin (13E5) Rabbit mAb #4970 (all from Cell Signaling), all are used according to the manufacturer's recommendations. Goat anti-mouse IRDye 680 and goat anti-rabbit IRDye 800 (L1-COR Biosciences) are used as secondary antibodies.

[0816] Similar to the results of the in vitro experiment described above in Example B-7, tumors from mice treated with Ab #7, but not mice treated with OA-5D5, will show increased degradation of c-Met. Similarly, degradation of EpCAM will not be observed in tumors from mice treated with either Ab#7 or OA-5D5.

### Additional Statements Regarding Incorporation by Reference and Variations

[0817] All references cited throughout this application, for example patent documents including issued or granted patents or equivalents; patent application publications; and non-patent literature documents or other source material; are hereby incorporated by reference herein in their entireties, as though individually incorporated by reference. Any sequence listing and sequence listing information is considered part of the disclosure herewith.

[0818] When a Markush group or other grouping of components or items is used herein, all individual members of the group and all combinations and subcombinations possible of the group are intended to be individually included in the disclosure.

[0819] As used herein, the singular forms “a”, “an”, and “the” include plural reference unless the context clearly dictates otherwise. Thus, for example, reference to “a cell” includes a plurality of such cells and equivalents thereof known to those skilled in the art, and so forth. As well, the terms “a” (or “an”), “one or more” and “at least one” can be used interchangeably herein. It is also to be noted that the terms “comprising”, “including”, and “containing” can be used interchangeably. The expression “of any of claims XX-YY” (wherein XX and YY refer to claim numbers) is intended to provide a multiple dependent claim in the alternative form, and in some embodiments is interchangeable with the expression “as in any one of claims XX-YY.”

[0820] Whenever a range of values is given in the specification, for example, a temperature range, a time range, or a composition, concentration, or other value range, all intermediate ranges and subranges, as well as all individual values included in the ranges given are intended to be included in the disclosure. As used herein, ranges specifically include the values provided as endpoint values of the range. For example, a range of 1 to 100 specifically includes the end point values of 1 and 100. It will be understood that any subranges or individual values in a range or subrange that are included in the description herein can be excluded from the claims herein.

[0821] As used herein, “comprising” is synonymous with “including,” “containing,” or “characterized by,” and is inclusive or open-ended and does not exclude additional, unrecited elements or method steps. As used herein, “consisting of” excludes any element, step, or ingredient not specified in the claim element. As used herein, “consisting essentially of” does not exclude materials or steps that do not materially affect the basic and novel characteristics of the claim. In each instance herein any of the terms “comprising”, “consisting essentially of” and “consisting of” may be optionally replaced with either of the other two terms, thus describing alternative aspects of the scope of the subject matter. The invention illustratively described herein suitably may be practiced in the absence of any element or elements, limitation or limitations which is not specifically disclosed herein.

[0822] One of ordinary skill in the art will appreciate that starting materials, biological and chemical materials, biological and chemical reagents, synthetic methods, purification methods, analytical methods, assay methods, and biological methods other than those specifically exemplified can be employed in the practice of the invention without resort to undue experimentation. All art-known functional equivalents, of any such materials and methods are intended to be included in this disclosure.

[0823] The terms and expressions which have been employed herein are used as terms of description and not of limitation, and there is no intention in the use of such terms and expressions of excluding any equivalents of the features shown and described or portions thereof, but it is recognized that various modifications are possible within the scope of the invention claimed. Thus, it should be understood that although aspects of the present invention have been specifically disclosed by various embodiments which may include preferred embodiments, exemplary embodiments and optional features, modifications and variations of the concepts herein disclosed may be resorted to by those skilled in the art. Such modifications and variations are considered to be within the scope of embodiments of the invention as described and as may be defined by the appended claims.

1. A Tandem Fc Bispecific Antibody (“TFcBA”) that comprises two polypeptide chains, a large chain and a Fab light chain, each chain having a C-terminus and an N-terminus, the TFcBA comprising a first binding site comprised by a Fab moiety comprising the Fab light chain and a Fab heavy chain, which Fab heavy chain is at the N-terminus of the large chain, which Fab moiety specifically binds to cMET, and which TFcBA further comprises a second binding site comprised by a single chain Fv (scFV) moiety at the C-terminus of the large chain, which scFv moiety specifically binds to EpCAM, wherein:
(a) the Fab heavy chain and the scFv moiety are linked through a Tandem Fc (“TFc”);
(b) the TFc is comprised by the large chain and has a first Fc region and a second Fc region which are linked through a TFc linker to form a contiguous polypeptide; and
(c) the first and the second Fc regions associate to form an Fc dimer, and further wherein
(d) the Fab light chain comprises an amino acid sequence comprising the three light chain CDRs present in SEQ ID NO:400; and
(e) the Fab heavy chain comprises an amino acid sequence comprising the three heavy chain CDRs present in SEQ ID NO:423.

2. The TFcBA of claim 1, wherein the scFV moiety comprises an amino acid sequence that is SEQ ID NO:488.

3. The TFcBA of claim 1 wherein the TFcBA large chain comprises, in N-terminal to C-terminal order:
(i) the Fab heavy chain variable region IgG1 CH1 domain;
(ii) a hybrid hinge containing an IgG1 upper hinge and an IgG4 middle and lower hinge;
(iii) a first IgG4 CH2 domain comprising a T299K mutation;
(iv) an first IgG1 CH3 domain comprising T366S, L368A, and Y407V mutations;
(v) a first disulfide bridge motif (KSCDKT) SEQ ID NO: 167;
(vi) a Tandem Fc linker, optionally a linker comprising the aa sequence (G₄S)₈,Q ID NO:491;
(vii) an IgG4 middle and lower hinge;
(viii) a second IgG4 CH2 domain comprising a T299D mutation;
(ix) a second IgG1 CH3 domain comprising a T366W mutation;
(x) a second disulfide bridge motif (GEC) SEQ ID NO:168;
(xi) a connecting linker; and
(xii) the scFv.

4. The TFcBA of claim 1 wherein the TFcBA exhibits a Kd for binding to cMET of less than about 10e-8, 10e-9, 10e-10, 10e-11, 10e-12, or 10e-13.

5. The TFcBA of claim 4, wherein the TFcBA exhibits a Kd for binding to cMET of from 3.0×10⁻⁸ to 2.5×10⁻⁹.

6. The TFcBA of claim 1 wherein the TFcBA exhibits a Kd for binding to EpCAM of less than about 10e-7, or 10e-8, or optionally 10e-9.

7. The TFcBA of claim 6 wherein the TFcBA exhibits a Kd for binding to cMET of from 10⁻⁸ to 10⁻¹¹.

8. The TFcBA of claim 1 wherein a TFc linker sequence comprises an amino acid sequence of SEQ ID NO:169.

9. The TFcBA of claim 1 wherein the TFc comprises an amino acid sequence selected from the group consisting of SEQ ID NO:171, SEQ ID NO:173, SEQ ID NO:175, SEQ ID NO:177, SEQ ID NO:179, SEQ ID NO:181, SEQ ID NO:183, SEQ ID NO:185, SEQ ID NO:187, SEQ ID NO:189, SEQ ID NO:191, SEQ ID NO:193 and SEQ ID NO:195.

10. A TFcBA molecule comprising a large chain comprising an amino acid sequence that is SEQ ID NO 489.

11. A method of treating a cancer patient, the method comprising administering to the patient a therapeutically effective amount of the TFcBA of claim 1 to the patient.

12. The method of claim 11, wherein one or more of the following conditions are met:
a) the cancer is a type of cancer disclosed herein;
b) the therapeutically effective amount is from 1 mg/kg of patient body weight to 10 mg/kg of patient body weight;
c) the therapeutically effective amount is from 100 ng/kg of patient body weight to 15 mg/kg of patient body weight; and
d) the therapeutically effective amount is from 1 mg/kg patient body weight to 25 mg/kg patient body weight.

13. A method of inhibiting tumor growth in a cancer patient, the method comprising administering to the patient a therapeutically effective amount of claim 1 to the patient.

14. A method of inhibiting tumor cell proliferation, the method comprising contacting a tumor cell with a fluid comprising a concentration of a TFcBA of claim 1, which concentration of the TFcBA is effective to inhibit proliferation of the tumor cells.

15. A pharmaceutical formulation comprising the TFcBA of claim 1 and a pharmaceutical carrier.

16. The pharmaceutical formulation of claim 15, wherein the formulation is a sterile formulation suitable for one or more of the following: injection, intravenous injection, and infusion.

17. The pharmaceutical formulation of claim 15, wherein the formulation is packaged in a pharmaceutically acceptable container.

18. A nucleic acid molecule encoding a protein amino acid sequence of claim 1.

19. A vector comprising the nucleic acid molecule of claim 18.

20. A host cell comprising a vector comprising the nucleic acid molecule of claim 18.

21. The host cell of claim 20 wherein the host cell expresses the encoded protein.

22. The method of claim 13, wherein one or more of the following conditions are met:
a) the therapeutically effective amount is from 100 ng/kg of patient body weight to 15 mg/kg of patient body weight;
b) the therapeutically effective amount is from 1 mg/kg of patient body weight to 10 mg/kg of patient body weight; and
c) the therapeutically effective amount is from 1 mg/kg of patient body weight to 25 mg/kg of patient body weight.

The application's sequence listing, which the Patent Office published only in electronic form, follows.

SEQUENCE LISTING (502 sequences)

SEQ ID NO: 1 - protein, 10 aa, Homo sapiens
EPKSCDKTHT

SEQ ID NO: 2 - protein, 5 aa, Homo sapiens
CPPCP

SEQ ID NO: 3 - protein, 6 aa, Homo sapiens
APELLG

SEQ ID NO: 4 - protein, 21 aa, Homo sapiens
EPKSCDKTHTCPPCPAPELLG

SEQ ID NO: 5 - protein, 7 aa, Homo sapiens
ERKCCVE

SEQ ID NO: 6 - protein, 7 aa, Homo sapiens
APPVAGP

SEQ ID NO: 7 - protein, 19 aa, Homo sapiens
ERKCCVECPPCPAPPVAGP

SEQ ID NO: 8 - protein, 12 aa, Homo sapiens
ELKTPLGDTTHT

SEQ ID NO: 9 - protein, 50 aa, Homo sapiens
CPRCPEPKSCDTPPPCPRCPEPKSCDTPPPCPRCPEPKSCDTPPPCPRCP

SEQ ID NO: 10 - protein, 6 aa, Homo sapiens
APELLG

SEQ ID NO: 11 - protein, 68 aa, Homo sapiens
ELKTPLGDTTHTCPRCPEPKSCDTPPPCPRCPEPKSCDTPPPCPRCPEPKSCDTPPPCPRCPAPELLG

SEQ ID NO: 12 - protein, 7 aa, Homo sapiens
ESKYGPP

SEQ ID NO: 13 - protein, 5 aa, Homo sapiens
CPSCP

SEQ ID NO: 14 - protein, 6 aa, Homo sapiens
APEFLG

SEQ ID NO: 15 - protein, 18 aa, Homo sapiens
ESKYGPPCPSCPAPEFLG

SEQ ID NO: 16 - protein, 10 aa, Artificial Sequence
  Description of Artificial Sequence: Synthetic peptide
EPKSCDKTCC

SEQ ID NO: 17 - protein, 10 aa, Artificial Sequence
  Description of Artificial Sequence: Synthetic peptide
EPKSCDKCHT

SEQ ID NO: 18 - protein, 21 aa, Artificial Sequence
  Description of Artificial Sequence: Synthetic peptide
EPKSCDKTCCCPPCPAPELLG

SEQ ID NO: 19 - protein, 21 aa, Artificial Sequence [sequence omitted]

SEQ ID NO: 20 - protein, 21 aa, Artificial Sequence [sequence omitted]

SEQ ID NO: 21 - protein, 21 aa, Artificial Sequence
  Description of Artificial Sequence: Synthetic peptide
EPKSCDKTCCCPSCPAPEFLG

SEQ ID NO: 22 - protein, 21 aa, Artificial Sequence
  Description of Artificial Sequence: Synthetic peptide
EPKSCDKCHTCPSCPAPEFLG

SEQ ID NO: 23 - protein, 11 aa, Artificial Sequence
  Description of Artificial Sequence: Synthetic peptide
CPPCPAPELLG

SEQ ID NO: 24 - protein, 11 aa, Artificial Sequence
  Description of Artificial Sequence: Synthetic peptide
CPSCPAPEFLG

SEQ ID NO: 25 - protein, 104 aa, Artificial Sequence
  Description of Artificial Sequence: Synthetic polypeptide
GPSVFLFPPKPKDTLMISRTPEVTCVVVDVSHEDPEVKFNWYVDGVEVHNAKTKPREEQYQSTYRVVSVLTVLHQDWLNGKEYKCKVSNKALPAPIEKTISKAK

SEQ ID NO: 26 - protein, 104 aa, Artificial Sequence
  Description of Artificial Sequence: Synthetic polypeptide
GPSVFLFPPKPKDTLMISRTPEVTCVVVDVSQEDPEVQFNWYVDGVEVHNAKTKPREEQFNSKYRVVSVLTVLHQDWLNGKEYKCKVSNKGLPSSIEKTISKAK

SEQ ID NO: 27 - protein, 107 aa, Homo sapiens
GQPREPQVYTLPPSRDELTKNQVSLTCLVKGFYPSDIAVEWESNGQPENNYKTTPPVLDSDGSFFLYSKLTVDKSRWQQGNVFSCSVMHEALHNHYTQKSLSLSPGK

SEQ ID NO: 28 - protein, 106 aa, Homo sapiens [sequence omitted]

SEQ ID NO: 29 - protein, 107 aa, Homo sapiens
GQPREPQVYTLPPSREEMTKNQVSLTCLVKGFYPSDIAVEWESNGQPENNYKTTPPVLDSDGSFFLYSKLTVDKSRWQQGNVFSCSVMHEALHNHYTQKSLSLSPGK

SEQ ID NO: 30 - protein, 106 aa, Homo sapiens
GQPREPQVYTLPPSREEMTKNQVSLTCLVKGFYPSDIAVEWESNGQPENNYKTTPPVLDSDGSFFLYSKLTVDKSRWQQGNVFSCSVMHEALHNHYTQKSLSLSPG

SEQ ID NO: 31 - protein, 107 aa, Artificial Sequence
  Description of Artificial Sequence: Synthetic polypeptide
GQPREPQVYTLPPSRDELTKNQVSLSCAVKGFYPSDIAVEWESNGQPENNYKTTPPVLDSDGSFFLVSKLTVDKSRWQQGNVFSCSVMHEALHNHYTQKSLSLSPGK

SEQ ID NO: 32 - protein, 106 aa, Artificial Sequence
  Description of Artificial Sequence: Synthetic polypeptide
GQPREPQVYTLPPSRDELTKNQVSLSCAVKGFYPSDIAVEWESNGQPENNYKTTPPVLDSDGSFFLVSKLTVDKSRWQQGNVFSCSVMHEALHNHYTQKSLSLSPG

SEQ ID NO: 33 - protein, 107 aa, Artificial Sequence
  Description of Artificial Sequence: Synthetic polypeptide
GQPREPQVYTLPPSREEMTKNQVSLSCAVKGFYPSDIAVEWESNGQPENNYKTTPPVLDSDGSFFLVSKLTVDKSRWQQGNVFSCSVMHEALHNHYTQKSLSLSPGK

SEQ ID NO: 34 - protein, 106 aa, Artificial Sequence
  Description of Artificial Sequence: Synthetic polypeptide
GQPREPQVYTLPPSREEMTKNQVSLSCAVKGFYPSDIAVEWESNGQPENNYKTTPPVLDSDGSFFLVSKLTVDKSRWQQGNVFSCSVMHEALHNHYTQKSLSLSPG

SEQ ID NO: 35 - protein, 107 aa, Artificial Sequence
  Description of Artificial Sequence: Synthetic polypeptide
GQPREPQVYTLPPSRDELTKNQVSLWCLVKGFYPSDIAVEWESNGQPENNYKTTPPVLDSDGSFFLYSKLTVDKSRWQQGNVFSCSVMHEALHNHYTQKSLSLSPGK

SEQ ID NO: 36 - protein, 106 aa, Artificial Sequence
  Description of Artificial Sequence: Synthetic polypeptide
GQPREPQVYTLPPSRDELTKNQVSLWCLVKGFYPSDIAVEWESNGQPENNYKTTPPVLDSDGSFFLYSKLTVDKSRWQQGNVFSCSVMHEALHNHYTQKSLSLSPG

SEQ ID NO: 37 - protein, 107 aa, Artificial Sequence
  Description of Artificial Sequence: Synthetic polypeptide
GQPREPQVYTLPPSREEMTKNQVSLWCLVKGFYPSDIAVEWESNGQPENNYKTTPPVLDSDGSFFLYSKLTVDKSRWQQGNVFSCSVMHEALHNHYTQKSLSLSPGK

SEQ ID NO: 38 - protein, 106 aa, Artificial Sequence
  Description of Artificial Sequence: Synthetic polypeptide
GQPREPQVYTLPPSREEMTKNQVSLWCLVKGFYPSDIAVEWESNGQPENNYKTTPPVLDSDGSFFLYSKLTVDKSRWQQGNVFSCSVMHEALHNHYTQKSLSLSPG

SEQ ID NO: 39 - protein, 107 aa, Artificial Sequence
  Description of Artificial Sequence: Synthetic polypeptide
GQPREPQVYTLPPSRDELTKNQVSLTCLVKGFYPSDIAVEWESNGQPENNYKTTPPVLDSDGSFFLTSKLTVDKSRWQQGNVFSCSVMHEALHNHYTQKSLSLSPGK

SEQ ID NO: 40 - protein, 106 aa, Artificial Sequence
  Description of Artificial Sequence: Synthetic polypeptide
GQPREPQVYTLPPSRDELTKNQVSLTCLVKGFYPSDIAVEWESNGQPENNYKTTPPVLDSDGSFFLTSKLTVDKSRWQQGNVFSCSVMHEALHNHYTQKSLSLSPG

SEQ ID NO: 41 - protein, 107 aa, Artificial Sequence
  Description of Artificial Sequence: Synthetic polypeptide
GQPREPQVYTLPPSREEMTKNQVSLTCLVKGFYPSDIAVEWESNGQPENNYKTTPPVLDSDGSFFLTSKLTVDKSRWQQGNVFSCSVMHEALHNHYTQKSLSLSPGK

SEQ ID NO: 42 - protein, 106 aa, Artificial Sequence
  Description of Artificial Sequence: Synthetic polypeptide
GQPREPQVYTLPPSREEMTKNQVSLTCLVKGFYPSDIAVEWESNGQPENNYKTTPPVLDSDGSFFLTSKLTVDKSRWQQGNVFSCSVMHEALHNHYTQKSLSLSPG

SEQ ID NO: 43 - protein, 107 aa, Artificial Sequence
  Description of Artificial Sequence: Synthetic polypeptide
GQPREPQVYTLPPSRDELTKNQVSLYCLVKGFYPSDIAVEWESNGQPENNYKTTPPVLDSDGSFFLYSKLTVDKSRWQQGNVFSCSVMHEALHNHYTQKSLSLSPGK

SEQ ID NO: 44 - protein, 106 aa, Artificial Sequence
  Description of Artificial Sequence: Synthetic polypeptide
GQPREPQVYTLPPSRDELTKNQVSLYCLVKGFYPSDIAVEWESNGQPENNYKTTPPVLDSDGSFFLYSKLTVDKSRWQQGNVFSCSVMHEALHNHYTQKSLSLSPG

SEQ ID NO: 45 - protein, 107 aa, Artificial Sequence
  Description of Artificial Sequence: Synthetic polypeptide
GQPREPQVYTLPPSREEMTKNQVSLYCLVKGFYPSDIAVEWESNGQPENNYKTTPPVLDSDGSFFLYSKLTVDKSRWQQGNVFSCSVMHEALHNHYTQKSLSLSPGK

SEQ ID NO: 46 - protein, 106 aa, Artificial Sequence
  Description of Artificial Sequence: Synthetic polypeptide
GQPREPQVYTLPPSREEMTKNQVSLYCLVKGFYPSDIAVEWESNGQPENNYKTTPPVLDSDGSFFLYSKLTVDKSRWQQGNVFSCSVMHEALHNHYTQKSLSLSPG

SEQ ID NO: 47 - protein, 107 aa, Artificial Sequence
  Description of Artificial Sequence: Synthetic polypeptide
GQPREPQVYTLPPSRDELTKNQVHLTCLVKGFYPSDIAVEWESNGQPENNYKTTPPVLDSDGSFALYSKLTVDKSRWQQGNVFSCSVMHEALHNHYTQKSLSLSPGK

SEQ ID NO: 48 - protein, 106 aa, Artificial Sequence
  Description of Artificial Sequence: Synthetic polypeptide
GQPREPQVYTLPPSRDELTKNQVHLTCLVKGFYPSDIAVEWESNGQPENNYKTTPPVLDSDGSFALYSKLTVDKSRWQQGNVFSCSVMHEALHNHYTQKSLSLSPG

SEQ ID NO: 49 - protein, 107 aa, Artificial Sequence
  Description of Artificial Sequence: Synthetic polypeptide
GQPREPQVYTLPPSREEMTKNQVHLTCLVKGFYPSDIAVEWESNGQPENNYKTTPPVLDSDGSFALYSKLTVDKSRWQQGNVFSCSVMHEALHNHYTQKSLSLSPGK

SEQ ID NO: 50 - protein, 106 aa, Artificial Sequence
  Description of Artificial Sequence: Synthetic polypeptide
GQPREPQVYTLPPSREEMTKNQVHLTCLVKGFYPSDIAVEWESNGQPENNYKTTPPVLDSDGSFALYSKLTVDKSRWQQGNVFSCSVMHEALHNHYTQKSLSLSPG

SEQ ID NO: 51 - protein, 107 aa, Artificial Sequence
  Description of Artificial Sequence: Synthetic polypeptide
GQPREPQVTTLPPSRDELTKNQVSLTCLVKGFYPSDIAVEWESNGQPENNYKTFPPVLDSDGSFFLYSKLTVDKSRWQQGNVFSCSVMHEALHNHYTQKSLSLSPGK

SEQ ID NO: 52 - protein, 106 aa, Artificial Sequence
  Description of Artificial Sequence: Synthetic polypeptide
GQPREPQVTTLPPSRDELTKNQVSLTCLVKGFYPSDIAVEWESNGQPENNYKTFPPVLDSDGSFFLYSKLTVDKSRWQQGNVFSCSVMHEALHNHYTQKSLSLSPG

SEQ ID NO: 53 - protein, 107 aa, Artificial Sequence
  Description of Artificial Sequence: Synthetic polypeptide
GQPREPQVTTLPPSREEMTKNQVSLTCLVKGFYPSDIAVEWESNGQPENNYKTFPPVLDSDGSFFLYSKLTVDKSRWQQGNVFSCSVMHEALHNHYTQKSLSLSPGK

SEQ ID NO: 54 - protein, 106 aa, Artificial Sequence
  Description of Artificial Sequence: Synthetic polypeptide
GQPREPQVTTLPPSREEMTKNQVSLTCLVKGFYPSDIAVEWESNGQPENNYKTFPPVLDSDGSFFLYSKLTVDKSRWQQGNVFSCSVMHEALHNHYTQKSLSLSPG

SEQ ID NO: 55 - protein, 107 aa, Artificial Sequence
  Description of Artificial Sequence: Synthetic polypeptide
GQPREPQVYTLPPSRDELTKNQVSLTCLVDGFYPSDIAVEWESNGQPENNYDTTPPVLDSDGSFFLYSDLTVDKSRWQQGNVFSCSVMHEALHNHYTQKSLSLSPGK

SEQ ID NO: 56 - protein, 106 aa, Artificial Sequence
  Description of Artificial Sequence: Synthetic polypeptide
GQPREPQVYTLPPSRDELTKNQVSLTCLVDGFYPSDIAVEWESNGQPENNYDTTPPVLDSDGSFFLYSDLTVDKSRWQQGNVFSCSVMHEALHNHYTQKSLSLSPG

SEQ ID NO: 57 - protein, 107 aa, Artificial Sequence
  Description of Artificial Sequence: Synthetic polypeptide
GQPREPQVYTLPPSREEMTKNQVSLTCLVDGFYPSDIAVEWESNGQPENNYDTTPPVLDSDGSFFLYSDLTVDKSRWQQGNVFSCSVMHEALHNHYTQKSLSLSPGK

SEQ ID NO: 58 - protein, 106 aa, Artificial Sequence
  Description of Artificial Sequence: Synthetic polypeptide
GQPREPQVYTLPPSREEMTKNQVSLTCLVDGFYPSDIAVEWESNGQPENNYDTTPPVLDSDGSFFLYSDLTVDKSRWQQGNVFSCSVMHEALHNHYTQKSLSLSPG

SEQ ID NO: 59 - protein, 107 aa, Artificial Sequence
  Description of Artificial Sequence: Synthetic polypeptide
GQPREPQVYTLPPSRKKLTKNQVSLTCLVKGFYPSDIAVEWESNGQPENNYKTTPPVLKSDGSFFLYSKLTVDKSRWQQGNVFSCSVMHEALHNHYTQKSLSLSPGK

SEQ ID NO: 60 - protein, 106 aa, Artificial Sequence
  Description of Artificial Sequence: Synthetic polypeptide
GQPREPQVYTLPPSRKKLTKNQVSLTCLVKGFYPSDIAVEWESNGQPENNYKTTPPVLKSDGSFFLYSKLTVDKSRWQQGNVFSCSVMHEALHNHYTQKSLSLSPG

SEQ ID NO: 61 - protein, 107 aa, Artificial Sequence
  Description of Artificial Sequence: Synthetic polypeptide
GQPREPQVYTLPPSRKKMTKNQVSLTCLVKGFYPSDIAVEWESNGQPENNYKTTPPVLKSDGSFFLYSKLTVDKSRWQQGNVFSCSVMHEALHNHYTQKSLSLSPGK

SEQ ID NO: 62 - protein, 106 aa, Artificial Sequence
  Description of Artificial Sequence: Synthetic polypeptide
GQPREPQVYTLPPSRKKMTKNQVSLTCLVKGFYPSDIAVEWESNGQPENNYKTTPPVLKSDGSFFLYSKLTVDKSRWQQGNVFSCSVMHEALHNHYTQKSLSLSPG

SEQ ID NO: 63 - protein, 107 aa, Artificial Sequence
  Description of Artificial Sequence: Synthetic polypeptide
GQPREPQVCTLPPSRDELTKNQVSLTCLVKGFYPSDIAVEWESNGQPENNYKTTPPVLDSDGSFFLYSKLTVDKSRWQQGNVFSCSVMHEALHNHYTQKSLSLSPGK

SEQ ID NO: 64 - protein, 106 aa, Artificial Sequence
  Description of Artificial Sequence: Synthetic polypeptide
GQPREPQVCTLPPSRDELTKNQVSLTCLVKGFYPSDIAVEWESNGQPENNYKTTPPVLDSDGSFFLYSKLTVDKSRWQQGNVFSCSVMHEALHNHYTQKSLSLSPG

SEQ ID NO: 65 - protein, 107 aa, Artificial Sequence
  Description of Artificial Sequence: Synthetic polypeptide
GQPREPQVCTLPPSREEMTKNQVSLTCLVKGFYPSDIAVEWESNGQPENNYKTTPPVLDSDGSFFLYSKLTVDKSRWQQGNVFSCSVMHEALHNHYTQKSLSLSPGK

SEQ ID NO: 66 - protein, 106 aa, Artificial Sequence
  Description of Artificial Sequence: Synthetic polypeptide
GQPREPQVCTLPPSREEMTKNQVSLTCLVKGFYPSDIAVEWESNGQPENNYKTTPPVLDSDGSFFLYSKLTVDKSRWQQGNVFSCSVMHEALHNHYTQKSLSLSPG

SEQ ID NO: 67 - protein, 107 aa, Artificial Sequence
  Description of Artificial Sequence: Synthetic polypeptide
GQPREPQVYTLPPCRDELTKNQVSLTCLVKGFYPSDIAVEWESNGQPENNYKTTPPVLDSDGSFFLYSKLTVDKSRWQQGNVFSCSVMHEALHNHYTQKSLSLSPGK

SEQ ID NO: 68 - protein, 106 aa, Artificial Sequence
  Description of Artificial Sequence: Synthetic polypeptide
GQPREPQVYTLPPCRDELTKNQVSLTCLVKGFYPSDIAVEWESNGQPENNYKTTPPVLDSDGSFFLYSKLTVDKSRWQQGNVFSCSVMHEALHNHYTQKSLSLSPG

SEQ ID NO: 69 - protein, 107 aa, Artificial Sequence; identical to SEQ ID NO: 67
  Description of Artificial Sequence: Synthetic polypeptide

SEQ ID NO: 70 - protein, 106 aa, Artificial Sequence; identical to SEQ ID NO: 68
  Description of Artificial Sequence: Synthetic polypeptide

SEQ ID NO: 71 - protein, 110 aa, Artificial Sequence
  Description of Artificial Sequence: Synthetic polypeptide
GQPREPQVYTLPPSRDELTKNQVSLTCLVKGFYPSDIAVEWESNGQPENNYKTTPPVLDSDGSFFLYSKLTVDKSRWQQGNVFSCSVMHEALHNHYTQKSLSLSKSCDKT

SEQ ID NO: 72 - protein, 110 aa, Artificial Sequence
  Description of Artificial Sequence: Synthetic polypeptide
GQPREPQVYTLPPSREEMTKNQVSLTCLVKGFYPSDIAVEWESNGQPENNYKTTPPVLDSDGSFFLYSKLTVDKSRWQQGNVFSCSVMHEALHNHYTQKSLSLSKSCDKT

SEQ ID NO: 73 - protein, 107 aa, Artificial Sequence
  Description of Artificial Sequence: Synthetic polypeptide
GQPREPQVYTLPPSRDELTKNQVSLTCLVKGFYPSDIAVEWESNGQPENNYKTTPPVLDSDGSFFLYSKLTVDKSRWQQGNVFSCSVMHEALHNHYTQKSLSLSGEC

SEQ ID NO: 74 - protein, 107 aa, Artificial Sequence
  Description of Artificial Sequence: Synthetic polypeptide
GQPREPQVYTLPPSREEMTKNQVSLTCLVKGFYPSDIAVEWESNGQPENNYKTTPPVLDSDGSFFLYSKLTVDKSRWQQGNVFSCSVMHEALHNHYTQKSLSLSGEC

SEQ ID NO: 75 - protein, 107 aa, Artificial Sequence
  Description of Artificial Sequence: Synthetic polypeptide
GQPREPQVCTLPPSRDELTKNQVSLSCAVKGFYPSDIAVEWESNGQPENNYKTTPPVLDSDGSFFLVSKLTVDKSRWQQGNVFSCSVMHEALHNHYTQKSLSLSPGK

SEQ ID NO: 76 - protein, 106 aa, Artificial Sequence
  Description of Artificial Sequence: Synthetic polypeptide
GQPREPQVCTLPPSRDELTKNQVSLSCAVKGFYPSDIAVEWESNGQPENNYKTTPPVLDSDGSFFLVSKLTVDKSRWQQGNVFSCSVMHEALHNHYTQKSLSLSPG

SEQ ID NO: 77 - protein, 107 aa, Artificial Sequence
  Description of Artificial Sequence: Synthetic polypeptide
GQPREPQVCTLPPSREEMTKNQVSLSCAVKGFYPSDIAVEWESNGQPENNYKTTPPVLDSDGSFFLVSKLTVDKSRWQQGNVFSCSVMHEALHNHYTQKSLSLSPGK

SEQ ID NO: 78 - protein, 106 aa, Artificial Sequence
  Description of Artificial Sequence: Synthetic polypeptide
GQPREPQVCTLPPSREEMTKNQVSLSCAVKGFYPSDIAVEWESNGQPENNYKTTPPVLDSDGSFFLVSKLTVDKSRWQQGNVFSCSVMHEALHNHYTQKSLSLSPG

SEQ ID NO: 79 - protein, 107 aa, Artificial Sequence
  Description of Artificial Sequence: Synthetic polypeptide
GQPREPQVYTLPPCRDELTKNQVSLWCLVKGFYPSDIAVEWESNGQPENNYKTTPPVLDSDGSFFLYSKLTVDKSRWQQGNVFSCSVMHEALHNHYTQKSLSLSPGK

SEQ ID NO: 80 - protein, 106 aa, Artificial Sequence
  Description of Artificial Sequence: Synthetic polypeptide
GQPREPQVYTLPPCRDELTKNQVSLWCLVKGFYPSDIAVEWESNGQPENNYKTTPPVLDSDGSFFLYSKLTVDKSRWQQGNVFSCSVMHEALHNHYTQKSLSLSPG

SEQ ID NO: 81 - protein, 107 aa, Artificial Sequence
  Description of Artificial Sequence: Synthetic polypeptide
GQPREPQVYTLPPCREEMTKNQVSLWCLVKGFYPSDIAVEWESNGQPENNYKTTPPVLDSDGSFFLYSKLTVDKSRWQQGNVFSCSVMHEALHNHYTQKSLSLSPGK

SEQ ID NO: 82 - protein, 106 aa, Artificial Sequence
  Description of Artificial Sequence: Synthetic polypeptide
GQPREPQVYTLPPCREEMTKNQVSLWCLVKGFYPSDIAVEWESNGQPENNYKTTPPVLDSDGSFFLYSKLTVDKSRWQQGNVFSCSVMHEALHNHYTQKSLSLSPG

SEQ ID NO: 83 - protein, 110 aa, Artificial Sequence
  Description of Artificial Sequence: Synthetic polypeptide
GQPREPQVYTLPPSRDELTKNQVSLSCAVKGFYPSDIAVEWESNGQPENNYKTTPPVLDSDGSFFLVSKLTVDKSRWQQGNVFSCSVMHEALHNHYTQKSLSLSKSCDKT

SEQ ID NO: 84 - protein, 110 aa, Artificial Sequence
  Description of Artificial Sequence: Synthetic polypeptide
GQPREPQVYTLPPSREEMTKNQVSLSCAVKGFYPSDIAVEWESNGQPENNYKTTPPVLDSDGSFFLVSKLTVDKSRWQQGNVFSCSVMHEALHNHYTQKSLSLSKSCDKT

SEQ ID NO: 85 - protein, 107 aa, Artificial Sequence
  Description of Artificial Sequence: Synthetic polypeptide
GQPREPQVYTLPPSRDELTKNQVSLWCLVKGFYPSDIAVEWESNGQPENNYKTTPPVLDSDGSFFLYSKLTVDKSRWQQGNVFSCSVMHEALHNHYTQKSLSLSGEC

SEQ ID NO: 86 - protein, 107 aa, Artificial Sequence
  Description of Artificial Sequence: Synthetic polypeptide
GQPREPQVYTLPPSREEMTKNQVSLWCLVKGFYPSDIAVEWESNGQPENNYKTTPPVLDSDGSFFLYSKLTVDKSRWQQGNVFSCSVMHEALHNHYTQKSLSLSGEC

SEQ ID NO: 87 - protein, 107 aa, Artificial Sequence
  Description of Artificial Sequence: Synthetic polypeptide
GQPREPQVYTLPPSRDELTKNQVSLSCAVKGFYPSDIAVEWESNGQPENNYKTTPPVLDSDGSFFLVSKLTVDKSRWQQGNVFSCSVMHEALHNHYTQKSLSLSGEC

SEQ ID NO: 88 - protein, 107 aa, Artificial Sequence
  Description of Artificial Sequence: Synthetic polypeptide
GQPREPQVYTLPPSREEMTKNQVSLSCAVKGFYPSDIAVEWESNGQPENNYKTTPPVLDSDGSFFLVSKLTVDKSRWQQGNVFSCSVMHEALHNHYTQKSLSLSGEC

SEQ ID NO: 89 - protein, 110 aa, Artificial Sequence
  Description of Artificial Sequence: Synthetic polypeptide
GQPREPQVYTLPPSRDELTKNQVSLWCLVKGFYPSDIAVEWESNGQPENNYKTTPPVLDSDGSFFLYSKLTVDKSRWQQGNVFSCSVMHEALHNHYTQKSLSLSKSCDKT

SEQ ID NO: 90 - protein, 110 aa, Artificial Sequence
  Description of Artificial Sequence: Synthetic polypeptide
GQPREPQVYTLPPSREEMTKNQVSLWCLVKGFYPSDIAVEWESNGQPENNYKTTPPVLDSDGSFFLYSKLTVDKSRWQQGNVFSCSVMHEALHNHYTQKSLSLSKSCDKT

SEQ ID NO: 91 - protein, 110 aa, Artificial Sequence
  Description of Artificial Sequence: Synthetic polypeptide
GQPREPQVYTLPPSRDELTKNQVHLTCLVKGFYPSDIAVEWESNGQPENNYKTTPPVLDSDGSFALYSKLTVDKSRWQQGNVFSCSVMHEALHNHYTQKSLSLSKSCDKT

SEQ ID NO: 92 - protein, 110 aa, Artificial Sequence
  Description of Artificial Sequence: Synthetic polypeptide
GQPREPQVYTLPPSREEMTKNQVHLTCLVKGFYPSDIAVEWESNGQPENNYKTTPPVLDSDGSFALYSKLTVDKSRWQQGNVFSCSVMHEALHNHYTQKSLSLSKSCDKT

SEQ ID NO: 93 - protein, 107 aa, Artificial Sequence
  Description of Artificial Sequence: Synthetic polypeptide
GQPREPQVTTLPPSRDELTKNQVSLTCLVKGFYPSDIAVEWESNGQPENNYKTFPPVLDSDGSFFLYSKLTVDKSRWQQGNVFSCSVMHEALHNHYTQKSLSLSGEC

SEQ ID NO: 94 - protein, 107 aa, Artificial Sequence
  Description of Artificial Sequence: Synthetic polypeptide
GQPREPQVTTLPPSREEMTKNQVSLTCLVKGFYPSDIAVEWESNGQPENNYKTFPPVLDSDGSFFLYSKLTVDKSRWQQGNVFSCSVMHEALHNHYTQKSLSLSGEC

SEQ ID NO: 95 - protein, 110 aa, Artificial Sequence
  Description of Artificial Sequence: Synthetic polypeptide
GQPREPQVYTLPPSRDELTKNQVSLTCLVDGFYPSDIAVEWESNGQPENNYDTTPPVLDSDGSFFLYSDLTVDKSRWQQGNVFSCSVMHEALHNHYTQKSLSLSKSCDKT

SEQ ID NO: 96 - protein, 110 aa, Artificial Sequence
  Description of Artificial Sequence: Synthetic polypeptide
GQPREPQVYTLPPSREEMTKNQVSLTCLVDGFYPSDIAVEWESNGQPENNYDTTPPVLDSDGSFFLYSDLTVDKSRWQQGNVFSCSVMHEALHNHYTQKSLSLSKSCDKT

SEQ ID NO: 97 - protein, 107 aa, Artificial Sequence
  Description of Artificial Sequence: Synthetic polypeptide
GQPREPQVYTLPPSRKKLTKNQVSLTCLVKGFYPSDIAVEWESNGQPENNYKTTPPVLKSDGSFFLYSKLTVDKSRWQQGNVFSCSVMHEALHNHYTQKSLSLSGEC

SEQ ID NO: 98 - protein, 107 aa, Artificial Sequence
  Description of Artificial Sequence: Synthetic polypeptide
GQPREPQVYTLPPSRKKMTKNQVSLTCLVKGFYPSDIAVEWESNGQPENNYKTTPPVLKSDGSFFLYSKLTVDKSRWQQGNVFSCSVMHEALHNHYTQKSLSLSGEC

SEQ ID NO: 99 - protein, 232 aa, Artificial Sequence
  Description of Artificial Sequence: Synthetic polypeptide
EPKSCDKTHTCPPCPAPELLGGPSVFLFPPKPKDTLMISRTPEVTCVVVDVSHEDPEVKFNWYVDGVEVHNAKTKPREEQYQSTYRVVSVLTVLHQDWLNGKEYKCKVSNKALPAPIEKTISKAKGQPREPQVYTLPPSREEMTKNQVSLTCLVKGFYPSDIAVEWESNGQPENNYKTTPPVLDSDGSFFLYSKLTVDKSRWQQGNVFSCSVMHEALHNHYTQKSLSLSPGK

SEQ ID NO: 100 - protein, 222 aa, Artificial Sequence
  Description of Artificial Sequence: Synthetic polypeptide
CPPCPAPELLGGPSVFLFPPKPKDTLMISRTPEVTCVVVDVSHEDPEVKFNWYVDGVEVHNAKTKPREEQYQSTYRVVSVLTVLHQDWLNGKEYKCKVSNKALPAPIEKTISKAKGQPREPQVYTLPPSREEMTKNQVSLTCLVKGFYPSDIAVEWESNGQPENNYKTTPPVLDSDGSFFLYSKLTVDKSRWQQGNVFSCSVMHEALHNHYTQKSLSLSPGK

SEQ ID NO: 101 - protein, 232 aa, Artificial Sequence
  Description of Artificial Sequence: Synthetic polypeptide
EPKSCDKTHTCPPCPAPELLGGPSVFLFPPKPKDTLMISRTPEVTCVVVDVSHEDPEVKFNWYVDGVEVHNAKTKPREEQYQSTYRVVSVLTVLHQDWLNGKEYKCKVSNKALPAPIEKTISKAKGQPREPQVYTLPPSREEMTKNQVSLSCAVKGFYPSDIAVEWESNGQPENNYKTTPPVLDSDGSFFLVSKLTVDKSRWQQGNVFSCSVMHEALHNHYTQKSLSLSPGK

SEQ ID NO: 102 - protein, 222 aa, Artificial Sequence
  Description of Artificial Sequence: Synthetic polypeptide
CPPCPAPELLGGPSVFLFPPKPKDTLMISRTPEVTCVVVDVSHEDPEVKFNWYVDGVEVHNAKTKPREEQYQSTYRVVSVLTVLHQDWLNGKEYKCKVSNKALPAPIEKTISKAKGQPREPQVYTLPPSREEMTKNQVSLWCLVKGFYPSDIAVEWESNGQPENNYKTTPPVLDSDGSFFLYSKLTVDKSRWQQGNVFSCSVMHEALHNHYTQKSLSLSPGK

SEQ ID NO: 103 - protein, 232 aa, Artificial Sequence
  Description of Artificial Sequence: Synthetic polypeptide
EPKSCDKTHTCPPCPAPELLGGPSVFLFPPKPKDTLMISRTPEVTCVVVDVSHEDPEVKFNWYVDGVEVHNAKTKPREEQYQSTYRVVSVLTVLHQDWLNGKEYKCKVSNKALPAPIEKTISKAKGQPREPQVYTLPPSREEMTKNQVSLWCLVKGFYPSDIAVEWESNGQPENNYKTTPPVLDSDGSFFLYSKLTVDKSRWQQGNVFSCSVMHEALHNHYTQKSLSLSPGK

SEQ ID NO: 104 - protein, 222 aa, Artificial Sequence
  Description of Artificial Sequence: Synthetic polypeptide
CPPCPAPELLGGPSVFLFPPKPKDTLMISRTPEVTCVVVDVSHEDPEVKFNWYVDGVEVHNAKTKPREEQYQSTYRVVSVLTVLHQDWLNGKEYKCKVSNKALPAPIEKTISKAKGQPREPQVYTLPPSREEMTKNQVSLSCAVKGFYPSDIAVEWESNGQPENNYKTTPPVLDSDGSFFLVSKLTVDKSRWQQGNVFSCSVMHEALHNHYTQKSLSLSPGK

SEQ ID NO: 105 - protein, 232 aa, Artificial Sequence
  Description of Artificial Sequence: Synthetic polypeptide
EPKSCDKTHTCPPCPAPELLGGPSVFLFPPKPKDTLMISRTPEVTCVVVDVSHEDPEVKFNWYVDGVEVHNAKTKPREEQYQSTYRVVSVLTVLHQDWLNGKEYKCKVSNKALPAPIEKTISKAKGQPREPQVCTLPPSREEMTKNQVSLSCAVKGFYPSDIAVEWESNGQPENNYKTTPPVLDSDGSFFLVSKLTVDKSRWQQGNVFSCSVMHEALHNHYTQKSLSLSPGK

SEQ ID NO: 106 - protein, 222 aa, Artificial Sequence
  Description of Artificial Sequence: Synthetic polypeptide
CPPCPAPELLGGPSVFLFPPKPKDTLMISRTPEVTCVVVDVSHEDPEVKFNWYVDGVEVHNAKTKPREEQYQSTYRVVSVLTVLHQDWLNGKEYKCKVSNKALPAPIEKTISKAKGQPREPQVYTLPPCREEMTKNQVSLWCLVKGFYPSDIAVEWESNGQPENNYKTTPPVLDSDGSFFLYSKLTVDKSRWQQGNVFSCSVMHEALHNHYTQKSLSLSPGK

SEQ ID NO: 107 - protein, 232 aa, Artificial Sequence
  Description of Artificial Sequence: Synthetic polypeptide
EPKSCDKTHTCPPCPAPELLGGPSVFLFPPKPKDTLMISRTPEVTCVVVDVSHEDPEVKFNWYVDGVEVHNAKTKPREEQYQSTYRVVSVLTVLHQDWLNGKEYKCKVSNKALPAPIEKTISKAKGQPREPQVYTLPPCREEMTKNQVSLWCLVKGFYPSDIAVEWESNGQPENNYKTTPPVLDSDGSFFLYSKLTVDKSRWQQGNVFSCSVMHEALHNHYTQKSLSLSPGK

SEQ ID NO: 108 - protein, 222 aa, Artificial Sequence
  Description of Artificial Sequence: Synthetic polypeptide
CPPCPAPELLGGPSVFLFPPKPKDTLMISRTPEVTCVVVDVSHEDPEVKFNWYVDGVEVHNAKTKPREEQYQSTYRVVSVLTVLHQDWLNGKEYKCKVSNKALPAPIEKTISKAKGQPREPQVCTLPPSREEMTKNQVSLSCAVKGFYPSDIAVEWESNGQPENNYKTTPPVLDSDGSFFLVSKLTVDKSRWQQGNVFSCSVMHEALHNHYTQKSLSLSPGK

SEQ ID NO: 109 - protein, 232 aa, Artificial Sequence
  Description of Artificial Sequence: Synthetic polypeptide
EPKSCDKTHTCPPCPAPELLGGPSVFLFPPKPKDTLMISRTPEVTCVVVDVSHEDPEVKFNWYVDGVEVHNAKTKPREEQYQSTYRVVSVLTVLHQDWLNGKEYKCKVSNKALPAPIEKTISKAKGQPREPQVYTLPPSREEMTKNQVSLTCLVKGFYPSDIAVEWESNGQPENNYKTTPPVLDSDGSFFLTSKLTVDKSRWQQGNVFSCSVMHEALHNHYTQKSLSLSPGK

SEQ ID NO: 110 - protein, 222 aa, Artificial Sequence
  Description of Artificial Sequence: Synthetic polypeptide
CPPCPAPELLGGPSVFLFPPKPKDTLMISRTPEVTCVVVDVSHEDPEVKFNWYVDGVEVHNAKTKPREEQYQSTYRVVSVLTVLHQDWLNGKEYKCKVSNKALPAPIEKTISKAKGQPREPQVYTLPPSREEMTKNQVSLYCLVKGFYPSDIAVEWESNGQPENNYKTTPPVLDSDGSFFLYSKLTVDKSRWQQGNVFSCSVMHEALHNHYTQKSLSLSPGK

SEQ ID NO: 111 - protein, 232 aa, Artificial Sequence
  Description of Artificial Sequence: Synthetic polypeptide
EPKSCDKTHTCPPCPAPELLGGPSVFLFPPKPKDTLMISRTPEVTCVVVDVSHEDPEVKFNWYVDGVEVHNAKTKPREEQYQSTYRVVSVLTVLHQDWLNGKEYKCKVSNKALPAPIEKTISKAKGQPREPQVYTLPPSREEMTKNQVSLYCLVKGFYPSDIAVEWESNGQPENNYKTTPPVLDSDGSFFLYSKLTVDKSRWQQGNVFSCSVMHEALHNHYTQKSLSLSPGK

SEQ ID NO: 112 - protein, 222 aa, Artificial Sequence
  Description of Artificial Sequence: Synthetic polypeptide
CPPCPAPELLGGPSVFLFPPKPKDTLMISRTPEVTCVVVDVSHEDPEVKFNWYVDGVEVHNAKTKPREEQYQSTYRVVSVLTVLHQDWLNGKEYKCKVSNKALPAPIEKTISKAKGQPREPQVYTLPPSREEMTKNQVSLTCLVKGFYPSDIAVEWESNGQPENNYKTTPPVLDSDGSFFLTSKLTVDKSRWQQGNVFSCSVMHEALHNHYTQKSLSLSPGK

SEQ ID NO: 113 - protein, 232 aa, Artificial Sequence
  Description of Artificial Sequence: Synthetic polypeptide
EPKSCDKTCCCPPCPAPELLGGPSVFLFPPKPKDTLMISRTPEVTCVVVDVSHEDPEVKFNWYVDGVEVHNAKTKPREEQYQSTYRVVSVLTVLHQDWLNGKEYKCKVSNKALPAPIEKTISKAKGQPREPQVYTLPPSREEMTKNQVSLSCAVKGFYPSDIAVEWESNGQPENNYKTTPPVLDSDGSFFLVSKLTVDKSRWQQGNVFSCSVMHEALHNHYTQKSLSLSPGK

SEQ ID NO: 114 - protein, 222 aa, Artificial Sequence; identical to SEQ ID NO: 102
  Description of Artificial Sequence: Synthetic polypeptide

SEQ ID NO: 115 - protein, 232 aa, Artificial Sequence
  Description of Artificial Sequence: Synthetic polypeptide
EPKSCDKCHTCPPCPAPELLGGPSVFLFPPKPKDTLMISRTPEVTCVVVDVSHEDPEVKFNWYVDGVEVHNAKTKPREEQYQSTYRVVSVLTVLHQDWLNGKEYKCKVSNKALPAPIEKTISKAKGQPREPQVYTLPPSREEMTKNQVSLSCAVKGFYPSDIAVEWESNGQPENNYKTTPPVLDSDGSFFLVSKLTVDKSRWQQGNVFSCSVMHEALHNHYTQKSLSLSPGK

SEQ ID NO: 116 - protein, 222 aa, Artificial Sequence; identical to SEQ ID NO: 102
  Description of Artificial Sequence: Synthetic polypeptide

SEQ ID NO: 117 - protein, 235 aa, Artificial Sequence
  Description of Artificial Sequence: Synthetic polypeptide
EPKSCDKTHTCPPCPAPELLGGPSVFLFPPKPKDTLMISRTPEVTCVVVDVSHEDPEVKFNWYVDGVEVHNAKTKPREEQYQSTYRVVSVLTVLHQDWLNGKEYKCKVSNKALPAPIEKTISKAKGQPREPQVYTLPPSREEMTKNQVSLSCAVKGFYPSDIAVEWESNGQPENNYKTTPPVLDSDGSFFLVSKLTVDKSRWQQGNVFSCSVMHEALHNHYTQKSLSLSKSCDKT

SEQ ID NO: 118 - protein, 222 aa, Artificial Sequence
  Description of Artificial Sequence: Synthetic polypeptide
CPPCPAPELLGGPSVFLFPPKPKDTLMISRTPEVTCVVVDVSHEDPEVKFNWYVDGVEVHNAKTKPREEQYQSTYRVVSVLTVLHQDWLNGKEYKCKVSNKALPAPIEKTISKAKGQPREPQVYTLPPSREEMTKNQVSLWCLVKGFYPSDIAVEWESNGQPENNYKTTPPVLDSDGSFFLYSKLTVDKSRWQQGNVFSCSVMHEALHNHYTQKSLSLSGEC

SEQ ID NO: 119 - protein, 232 aa, Artificial Sequence
  Description of Artificial Sequence: Synthetic polypeptide
EPKSCDKTHTCPPCPAPELLGGPSVFLFPPKPKDTLMISRTPEVTCVVVDVSHEDPEVKFNWYVDGVEVHNAKTKPREEQYQSTYRVVSVLTVLHQDWLNGKEYKCKVSNKALPAPIEKTISKAKGQPREPQVYTLPPSREEMTKNQVSLWCLVKGFYPSDIAVEWESNGQPENNYKTTPPVLDSDGSFFLYSKLTVDKSRWQQGNVFSCSVMHEALHNHYTQKSLSLSGEC

SEQ ID NO: 120 - protein, 225 aa, Artificial Sequence
  Description of Artificial Sequence: Synthetic polypeptide
CPPCPAPELLGGPSVFLFPPKPKDTLMISRTPEVTCVVVDVSHEDPEVKFNWYVDGVEVHNAKTKPREEQYQSTYRVVSVLTVLHQDWLNGKEYKCKVSNKALPAPIEKTISKAKGQPREPQVYTLPPSREEMTKNQVSLSCAVKGFYPSDIAVEWESNGQPENNYKTTPPVLDSDGSFFLVSKLTVDKSRWQQGNVFSCSVMHEALHNHYTQKSLSLSKSCDKT

SEQ ID NO: 121 - protein, 232 aa, Artificial Sequence
  Description of Artificial Sequence: Synthetic polypeptide
EPKSCDKTHTCPPCPAPELLGGPSVFLFPPKPKDTLMISRTPEVTCVVVDVSHEDPEVKFNWYVDGVEVHNAKTKPREEQYQSTYRVVSVLTVLHQDWLNGKEYKCKVSNKALPAPIEKTISKAKGQPREPQVYTLPPSREEMTKNQVSLSCAVKGFYPSDIAVEWESNGQPENNYKTTPPVLDSDGSFFLVSKLTVDKSRWQQGNVFSCSVMHEALHNHYTQKSLSLSGEC

SEQ ID NO: 122 - protein, 225 aa, Artificial Sequence
  Description of Artificial Sequence: Synthetic polypeptide
CPPCPAPELLGGPSVFLFPPKPKDTLMISRTPEVTCVVVDVSHEDPEVKFNWYVDGVEVHNAKTKPREEQYQSTYRVVSVLTVLHQDWLNGKEYKCKVSNKALPAPIEKTISKAKGQPREPQVYTLPPSREEMTKNQVSLWCLVKGFYPSDIAVEWESNGQPENNYKTTPPVLDSDGSFFLYSKLTVDKSRWQQGNVFSCSVMHEALHNHYTQKSLSLSKSCDKT

SEQ ID NO: 123 - protein, 235 aa, Artificial Sequence
  Description of Artificial Sequence: Synthetic polypeptide
EPKSCDKTHTCPPCPAPELLGGPSVFLFPPKPKDTLMISRTPEVTCVVVDVSHEDPEVKFNWYVDGVEVHNAKTKPREEQYQSTYRVVSVLTVLHQDWLNGKEYKCKVSNKALPAPIEKTISKAKGQPREPQVYTLPPSREEMTKNQVSLWCLVKGFYPSDIAVEWESNGQPENNYKTTPPVLDSDGSFFLYSKLTVDKSRWQQGNVFSCSVMHEALHNHYTQKSLSLSKSCDKT

SEQ ID NO: 124 - protein, 222 aa, Artificial Sequence
  Description of Artificial Sequence: Synthetic polypeptide
CPPCPAPELLGGPSVFLFPPKPKDTLMISRTPEVTCVVVDVSHEDPEVKFNWYVDGVEVHNAKTKPREEQYQSTYRVVSVLTVLHQDWLNGKEYKCKVSNKALPAPIEKTISKAKGQPREPQVYTLPPSREEMTKNQVSLSCAVKGFYPSDIAVEWESNGQPENNYKTTPPVLDSDGSFFLVSKLTVDKSRWQQGNVFSCSVMHEALHNHYTQKSLSLSGEC

SEQ ID NO: 125 - protein, 235 aa, Artificial Sequence
  Description of Artificial Sequence: Synthetic polypeptide
EPKSCDKTHTCPPCPAPELLGGPSVFLFPPKPKDTLMISRTPEVTCVVVDVSHEDPEVKFNWYVDGVEVHNAKTKPREEQYQSTYRVVSVLTVLHQDWLNGKEYKCKVSNKALPAPIEKTISKAKGQPREPQVYTLPPSREEMTKNQVHLTCLVKGFYPSDIAVEWESNGQPENNYKTTPPVLDSDGSFALYSKLTVDKSRWQQGNVFSCSVMHEALHNHYTQKSLSLSKSCDKT

SEQ ID NO: 126 - protein, 222 aa, Artificial Sequence
  Description of Artificial Sequence: Synthetic polypeptide
CPPCPAPELLGGPSVFLFPPKPKDTLMISRTPEVTCVVVDVSHEDPEVKFNWYVDGVEVHNAKTKPREEQYQSTYRVVSVLTVLHQDWLNGKEYKCKVSNKALPAPIEKTISKAKGQPREPQVTTLPPSREEMTKNQVSLTCLVKGFYPSDIAVEWESNGQPENNYKTFPPVLDSDGSFFLYSKLTVDKSRWQQGNVFSCSVMHEALHNHYTQKSLSLSGEC

SEQ ID NO: 127 - protein, 232 aa, Artificial Sequence
  Description of Artificial Sequence: Synthetic polypeptide
EPKSCDKTHTCPPCPAPELLGGPSVFLFPPKPKDTLMISRTPEVTCVVVDVSHEDPEVKFNWYVDGVEVHNAKTKPREEQYQSTYRVVSVLTVLHQDWLNGKEYKCKVSNKALPAPIEKTISKAKGQPREPQVTTLPPSREEMTKNQVSLTCLVKGFYPSDIAVEWESNGQPENNYKTFPPVLDSDGSFFLYSKLTVDKSRWQQGNVFSCSVMHEALHNHYTQKSLSLSGEC

SEQ ID NO: 128 - protein, 225 aa, Artificial Sequence
  Description of Artificial Sequence: Synthetic polypeptide
CPPCPAPELLGGPSVFLFPPKPKDTLMISRTPEVTCVVVDVSHEDPEVKFNWYVDGVEVHNAKTKPREEQYQSTYRVVSVLTVLHQDWLNGKEYKCKVSNKALPAPIEKTISKAKGQPREPQVYTLPPSREEMTKNQVHLTCLVKGFYPSDIAVEWESNGQPENNYKTTPPVLDSDGSFALYSKLTVDKSRWQQGNVFSCSVMHEALHNHYTQKSLSLSKSCDKT

SEQ ID NO: 129 - protein, 235 aa, Artificial Sequence
  Description of Artificial Sequence: Synthetic polypeptide
EPKSCDKTHTCPPCPAPELLGGPSVFLFPPKPKDTLMISRTPEVTCVVVDVSHEDPEVKFNWYVDGVEVHNAKTKPREEQYQSTYRVVSVLTVLHQDWLNGKEYKCKVSNKALPAPIEKTISKAKGQPREPQVYTLPPSREEMTKNQVSLTCLVDGFYPSDIAVEWESNGQPENNYDTTPPVLDSDGSFFLYSDLTVDKSRWQQGNVFSCSVMHEALHNHYTQKSLSLSKSCDKT

SEQ ID NO: 130 - protein, 222 aa, Artificial Sequence
  Description of Artificial Sequence: Synthetic polypeptide
CPPCPAPELLGGPSVFLFPPKPKDTLMISRTPEVTCVVVDVSHEDPEVKFNWYVDGVEVHNAKTKPREEQYQSTYRVVSVLTVLHQDWLNGKEYKCKVSNKALPAPIEKTISKAKGQPREPQVYTLPPSRKKMTKNQVSLTCLVKGFYPSDIAVEWESNGQPENNYKTTPPVLKSDGSFFLYSKLTVDKSRWQQGNVFSCSVMHEALHNHYTQKSLSLSGEC

SEQ ID NO: 131 - protein, 232 aa, Artificial Sequence
  Description of Artificial Sequence: Synthetic polypeptide
EPKSCDKTHTCPPCPAPELLGGPSVFLFPPKPKDTLMISRTPEVTCVVVDVSHEDPEVKFNWYVDGVEVHNAKTKPREEQYQSTYRVVSVLTVLHQDWLNGKEYKCKVSNKALPAPIEKTISKAKGQPREPQVYTLPPSRKKMTKNQVSLTCLVKGFYPSDIAVEWESNGQPENNYKTTPPVLKSDGSFFLYSKLTVDKSRWQQGNVFSCSVMHEALHNHYTQKSLSLSGEC

SEQ ID NO: 132 - protein, 225 aa, Artificial Sequence
  Description of Artificial Sequence: Synthetic polypeptide
CPPCPAPELLGGPSVFLFPPKPKDTLMISRTPEVTCVVVDVSHEDPEVKFNWYVDGVEVHNAKTKPREEQYQSTYRVVSVLTVLHQDWLNGKEYKCKVSNKALPAPIEKTISKAKGQPREPQVYTLPPSREEMTKNQVSLTCLVDGFYPSDIAVEWESNGQPENNYDTTPPVLDSDGSFFLYSDLTVDKSRWQQGNVFSCSVMHEALHNHYTQKSLSLSKSCDKT

SEQ ID NO: 133 - protein, 232 aa, Artificial Sequence
  Description of Artificial Sequence: Synthetic polypeptide
EPKSCDKTHTCPSCPAPEFLGGPSVFLFPPKPKDTLMISRTPEVTCVVVDVSQEDPEVQFNWYVDGVEVHNAKTKPREEQFNSKYRVVSVLTVLHQDWLNGKEYKCKVSNKGLPSSIEKTISKAKGQPREPQVYTLPPSREEMTKNQVSLTCLVKGFYPSDIAVEWESNGQPENNYKTTPPVLDSDGSFFLYSKLTVDKSRWQQGNVFSCSVMHEALHNHYTQKSLSLSPGK

SEQ ID NO: 134 - protein, 222 aa, Artificial Sequence
  Description of Artificial Sequence: Synthetic polypeptide
CPSCPAPEFLGGPSVFLFPPKPKDTLMISRTPEVTCVVVDVSQEDPEVQFNWYVDGVEVHNAKTKPREEQFNSKYRVVSVLTVLHQDWLNGKEYKCKVSNKGLPSSIEKTISKAKGQPREPQVYTLPPSREEMTKNQVSLTCLVKGFYPSDIAVEWESNGQPENNYKTTPPVLDSDGSFFLYSKLTVDKSRWQQGNVFSCSVMHEALHNHYTQKSLSLSPGK

SEQ ID NO: 135 - protein, 232 aa, Artificial Sequence
  Description of Artificial Sequence: Synthetic polypeptide
EPKSCDKTHTCPSCPAPEFLGGPSVFLFPPKPKDTLMISRTPEVTCVVVDVSQEDPEVQFNWYVDGVEVHNAKTKPREEQFNSKYRVVSVLTVLHQDWLNGKEYKCKVSNKGLPSSIEKTISKAKGQPREPQVYTLPPSREEMTKNQVSLSCAVKGFYPSDIAVEWESNGQPENNYKTTPPVLDSDGSFFLVSKLTVDKSRWQQGNVFSCSVMHEALHNHYTQKSLSLSPGK

SEQ ID NO: 136 - protein, 222 aa, Artificial Sequence
  Description of Artificial Sequence: Synthetic polypeptide
CPSCPAPEFLGGPSVFLFPPKPKDTLMISRTPEVTCVVVDVSQEDPEVQFNWYVDGVEVHNAKTKPREEQFNSKYRVVSVLTVLHQDWLNGKEYKCKVSNKGLPSSIEKTISKAKGQPREPQVYTLPPSREEMTKNQVSLWCLVKGFYPSDIAVEWESNGQPENNYKTTPPVLDSDGSFFLYSKLTVDKSRWQQGNVFSCSVMHEALHNHYTQKSLSLSPGK

SEQ ID NO: 137 - protein, 232 aa, Artificial Sequence
  Description of Artificial Sequence: Synthetic polypeptide
EPKSCDKTHTCPSCPAPEFLGGPSVFLFPPKPKDTLMISRTPEVTCVVVDVSQEDPEVQFNWYVDGVEVHNAKTKPREEQFNSKYRVVSVLTVLHQDWLNGKEYKCKVSNKGLPSSIEKTISKAKGQPREPQVYTLPPSREEMTKNQVSLWCLVKGFYPSDIAVEWESNGQPENNYKTTPPVLDSDGSFFLYSKLTVDKSRWQQGNVFSCSVMHEALHNHYTQKSLSLSPGK

SEQ ID NO: 138 - protein, 222 aa, Artificial Sequence
  Description of Artificial Sequence: Synthetic polypeptide
CPSCPAPEFLGGPSVFLFPPKPKDTLMISRTPEVTCVVVDVSQEDPEVQFNWYVDGVEVHNAKTKPREEQFNSKYRVVSVLTVLHQDWLNGKEYKCKVSNKGLPSSIEKTISKAKGQPREPQVYTLPPSREEMTKNQVSLSCAVKGFYPSDIAVEWESNGQPENNYKTTPPVLDSDGSFFLVSKLTVDKSRWQQGNVFSCSVMHEALHNHYTQKSLSLSPGK

SEQ ID NO: 139 - protein, 232 aa, Artificial Sequence
  Description of Artificial Sequence: Synthetic polypeptide
EPKSCDKTHTCPSCPAPEFLGGPSVFLFPPKPKDTLMISRTPEVTCVVVDVSQEDPEVQFNWYVDGVEVHNAKTKPREEQFNSKYRVVSVLTVLHQDWLNGKEYKCKVSNKGLPSSIEKTISKAKGQPREPQVCTLPPSREEMTKNQVSLSCAVKGFYPSDIAVEWESNGQPENNYKTTPPVLDSDGSFFLVSKLTVDKSRWQQGNVFSCSVMHEALHNHYTQKSLSLSPGK

SEQ ID NO: 140 - protein, 222 aa, Artificial Sequence
  Description of Artificial Sequence: Synthetic polypeptide
CPSCPAPEFLGGPSVFLFPPKPKDTLMISRTPEVTCVVVDVSQEDPEVQFNWYVDGVEVHNAKTKPREEQFNSKYRVVSVLTVLHQDWLNGKEYKCKVSNKGLPSSIEKTISKAKGQPREPQVYTLPPCREEMTKNQVSLWCLVKGFYPSDIAVEWESNGQPENNYKTTPPVLDSDGSFFLYSKLTVDKSRWQQGNVFSCSVMHEALHNHYTQKSLSLSPGK

SEQ ID NO: 141 - protein, 232 aa, Artificial Sequence
  Description of Artificial Sequence: Synthetic polypeptide
EPKSCDKTHTCPSCPAPEFLGGPSVFLFPPKPKDTLMISRTPEVTCVVVDVSQEDPEVQFNWYVDGVEVHNAKTKPREEQFNSKYRVVSVLTVLHQDWLNGKEYKCKVSNKGLPSSIEKTISKAKGQPREPQVYTLPPCREEMTKNQVSLWCLVKGFYPSDIAVEWESNGQPENNYKTTPPVLDSDGSFFLYSKLTVDKSRWQQGNVFSCSVMHEALHNHYTQKSLSLSPGK

SEQ ID NO: 142 - protein, 222 aa, Artificial Sequence
  Description of Artificial Sequence: Synthetic polypeptide
CPSCPAPEFLGGPSVFLFPPKPKDTLMISRTPEVTCVVVDVSQEDPEVQFNWYVDGVEVHNAKTKPREEQFNSKYRVVSVLTVLHQDWLNGKEYKCKVSNKGLPSSIEKTISKAKGQPREPQVCTLPPSREEMTKNQVSLSCAVKGFYPSDIAVEWESNGQPENNYKTTPPVLDSDGSFFLVSKLTVDKSRWQQGNVFSCSVMHEALHNHYTQKSLSLSPGK

SEQ ID NO: 143 - protein, 232 aa, Artificial Sequence
  Description of Artificial Sequence: Synthetic polypeptide
EPKSCDKTHTCPSCPAPEFLGGPSVFLFPPKPKDTLMISRTPEVTCVVVDVSQEDPEVQFNWYVDGVEVHNAKTKPREEQFNSKYRVVSVLTVLHQDWLNGKEYKCKVSNKGLPSSIEKTISKAKGQPREPQVYTLPPSREEMTKNQVSLTCLVKGFYPSDIAVEWESNGQPENNYKTTPPVLDSDGSFFLTSKLTVDKSRWQQGNVFSCSVMHEALHNHYTQKSLSLSPGK

SEQ ID NO: 144 - protein, 222 aa, Artificial Sequence
  Description of Artificial Sequence: Synthetic polypeptide
CPSCPAPEFLGGPSVFLFPPKPKDTLMISRTPEVTCVVVDVSQEDPEVQFNWYVDGVEVHNAKTKPREEQFNSKYRVVSVLTVLHQDWLNGKEYKCKVSNKGLPSSIEKTISKAKGQPREPQVYTLPPSREEMTKNQVSLYCLVKGFYPSDIAVEWESNGQPENNYKTTPPVLDSDGSFFLYSKLTVDKSRWQQGNVFSCSVMHEALHNHYTQKSLSLSPGK

SEQ ID NO: 145 - protein, 232 aa, Artificial Sequence
  Description of Artificial Sequence: Synthetic polypeptide
EPKSCDKTHTCPSCPAPEFLGGPSVFLFPPKPKDTLMISRTPEVTCVVVDVSQEDPEVQFNWYVDGVEVHNAKTKPREEQFNSKYRVVSVLTVLHQDWLNGKEYKCKVSNKGLPSSIEKTISKAKGQPREPQVYTLPPSREEMTKNQVSLYCLVKGFYPSDIAVEWESNGQPENNYKTTPPVLDSDGSFFLYSKLTVDKSRWQQGNVFSCSVMHEALHNHYTQKSLSLSPGK

SEQ ID NO: 146 - protein, 222 aa, Artificial Sequence
  Description of Artificial Sequence: Synthetic polypeptide
CPSCPAPEFLGGPSVFLFPPKPKDTLMISRTPEVTCVVVDVSQEDPEVQFNWYVDGVEVHNAKTKPREEQFNSKYRVVSVLTVLHQDWLNGKEYKCKVSNKGLPSSIEKTISKAKGQPREPQVYTLPPSREEMTKNQVSLTCLVKGFYPSDIAVEWESNGQPENNYKTTPPVLDSDGSFFLTSKLTVDKSRWQQGNVFSCSVMHEALHNHYTQKSLSLSPGK

SEQ ID NO: 147 - protein, 232 aa, Artificial Sequence
  Description of Artificial Sequence: Synthetic polypeptide
EPKSCDKTCCCPSCPAPEFLGGPSVFLFPPKPKDTLMISRTPEVTCVVVDVSQEDPEVQFNWYVDGVEVHNAKTKPREEQFNSKYRVVSVLTVLHQDWLNGKEYKCKVSNKGLPSSIEKTISKAKGQPREPQVYTLPPSREEMTKNQVSLSCAVKGFYPSDIAVEWESNGQPENNYKTTPPVLDSDGSFFLVSKLTVDKSRWQQGNVFSCSVMHEALHNHYTQKSLSLSPGK

SEQ ID NO: 148 - protein, 222 aa, Artificial Sequence; identical to SEQ ID NO: 136
  Description of Artificial Sequence: Synthetic polypeptide

SEQ ID NO: 149 - protein, 232 aa, Artificial Sequence
  Description of Artificial Sequence: Synthetic polypeptide
EPKSCDKCHTCPSCPAPEFLGGPSVFLFPPKPKDTLMISRTPEVTCVVVDVSQEDPEVQFNWYVDGVEVHNAKTKPREEQFNSKYRVVSVLTVLHQDWLNGKEYKCKVSNKGLPSSIEKTISKAKGQPREPQVYTLPPSREEMTKNQVSLSCAVKGFYPSDIAVEWESNGQPENNYKTTPPVLDSDGSFFLVSKLTVDKSRWQQGNVFSCSVMHEALHNHYTQKSLSLSPGK

SEQ ID NO: 150 - protein, 222 aa, Artificial Sequence; identical to SEQ ID NO: 136
  Description of Artificial Sequence: Synthetic polypeptide

SEQ ID NO: 151 - protein, 235 aa, Artificial Sequence
  Description of Artificial Sequence: Synthetic polypeptide
EPKSCDKTHTCPSCPAPEFLGGPSVFLFPPKPKDTLMISRTPEVTCVVVDVSQEDPEVQFNWYVDGVEVHNAKTKPREEQFNSKYRVVSVLTVLHQDWLNGKEYKCKVSNKGLPSSIEKTISKAKGQPREPQVYTLPPSREEMTKNQVSLSCAVKGFYPSDIAVEWESNGQPENNYKTTPPVLDSDGSFFLVSKLTVDKSRWQQGNVFSCSVMHEALHNHYTQKSLSLSKSCDKT

SEQ ID NO: 152 - protein, 222 aa, Artificial Sequence
  Description of Artificial Sequence: Synthetic polypeptide
CPSCPAPEFLGGPSVFLFPPKPKDTLMISRTPEVTCVVVDVSQEDPEVQFNWYVDGVEVHNAKTKPREEQFNSKYRVVSVLTVLHQDWLNGKEYKCKVSNKGLPSSIEKTISKAKGQPREPQVYTLPPSREEMTKNQVSLWCLVKGFYPSDIAVEWESNGQPENNYKTTPPVLDSDGSFFLYSKLTVDKSRWQQGNVFSCSVMHEALHNHYTQKSLSLSGEC

SEQ ID NO: 153 - protein, 232 aa, Artificial Sequence
  Description of Artificial Sequence: Synthetic polypeptide
EPKSCDKTHTCPSCPAPEFLGGPSVFLFPPKPKDTLMISRTPEVTCVVVDVSQEDPEVQFNWYVDGVEVHNAKTKPREEQFNSKYRVVSVLTVLHQDWLNGKEYKCKVSNKGLPSSIEKTISKAKGQPREPQVYTLPPSREEMTKNQVSLWCLVKGFYPSDIAVEWESNGQPENNYKTTPPVLDSDGSFFLYSKLTVDKSRWQQGNVFSCSVMHEALHNHYTQKSLSLSGEC

SEQ ID NO: 154 - protein, 225 aa, Artificial Sequence
  Description of Artificial Sequence: Synthetic polypeptide
CPSCPAPEFLGGPSVFLFPPKPKDTLMISRTPEVTCVVVDVSQEDPEVQFNWYVDGVEVHNAKTKPREEQFNSKYRVVSVLTVLHQDWLNGKEYKCKVSNKGLPSSIEKTISKAKGQPREPQVYTLPPSREEMTKNQVSLSCAVKGFYPSDIAVEWESNGQPENNYKTTPPVLDSDGSFFLVSKLTVDKSRWQQGNVFSCSVMHEALHNHYTQKSLSLSKSCDKT

SEQ ID NO: 155 - protein, 232 aa, Artificial Sequence
  Description of Artificial Sequence: Synthetic polypeptide
EPKSCDKTHTCPSCPAPEFLGGPSVFLFPPKPKDTLMISRTPEVTCVVVDVSQEDPEVQFNWYVDGVEVHNAKTKPREEQFNSKYRVVSVLTVLHQDWLNGKEYKCKVSNKGLPSSIEKTISKAKGQPREPQVYTLPPSREEMTKNQVSLSCAVKGFYPSDIAVEWESNGQPENNYKTTPPVLDSDGSFFLVSKLTVDKSRWQQGNVFSCSVMHEALHNHYTQKSLSLSGEC

SEQ ID NO: 156 - protein, 225 aa, Artificial Sequence
  Description of Artificial Sequence: Synthetic polypeptide
CPSCPAPEFLGGPSVFLFPPKPKDTLMISRTPEVTCVVVDVSQEDPEVQFNWYVDGVEVHNAKTKPREEQFNSKYRVVSVLTVLHQDWLNGKEYKCKVSNKGLPSSIEKTISKAKGQPREPQVYTLPPSREEMTKNQVSLWCLVKGFYPSDIAVEWESNGQPENNYKTTPPVLDSDGSFFLYSKLTVDKSRWQQGNVFSCSVMHEALHNHYTQKSLSLSKSCDKT

SEQ ID NO: 157 - protein, 235 aa, Artificial Sequence
  Description of Artificial Sequence: Synthetic polypeptide
EPKSCDKTHTCPSCPAPEFLGGPSVFLFPPKPKDTLMISRTPEVTCVVVDVSQEDPEVQFNWYVDGVEVHNAKTKPREEQFNSKYRVVSVLTVLHQDWLNGKEYKCKVSNKGLPSSIEKTISKAKGQPREPQVYTLPPSREEMTKNQVSLWCLVKGFYPSDIAVEWESNGQPENNYKTTPPVLDSDGSFFLYSKLTVDKSRWQQGNVFSCSVMHEALHNHYTQKSLSLSKSCDKT

SEQ ID NO: 158 - protein, 222 aa, Artificial Sequence
  Description of Artificial Sequence: Synthetic polypeptide
CPSCPAPEFLGGPSVFLFPPKPKDTLMISRTPEVTCVVVDVSQEDPEVQFNWYVDGVEVHNAKTKPREEQFNSKYRVVSVLTVLHQDWLNGKEYKCKVSNKGLPSSIEKTISKAKGQPREPQVYTLPPSREEMTKNQVSLSCAVKGFYPSDIAVEWESNGQPENNYKTTPPVLDSDGSFFLVSKLTVDKSRWQQGNVFSCSVMHEALHNHYTQKSLSLSGEC

SEQ ID NO: 159 - protein, 235 aa, Artificial Sequence
  Description of Artificial Sequence: Synthetic polypeptide
EPKSCDKTHTCPSCPAPEFLGGPSVFLFPPKPKDTLMISRTPEVTCVVVDVSQEDPEVQFNWYVDGVEVHNAKTKPREEQFNSKYRVVSVLTVLHQDWLNGKEYKCKVSNKGLPSSIEKTISKAKGQPREPQVYTLPPSREEMTKNQVHLTCLVKGFYPSDIAVEWESNGQPENNYKTTPPVLDSDGSFALYSKLTVDKSRWQQGNVFSCSVMHEALHNHYTQKSLSLSKSCDKT

SEQ ID NO: 160 - protein, 222 aa, Artificial Sequence
  Description of Artificial Sequence: Synthetic polypeptide
CPSCPAPEFLGGPSVFLFPPKPKDTLMISRTPEVTCVVVDVSQEDPEVQFNWYVDGVEVHNAKTKPREEQFNSKYRVVSVLTVLHQDWLNGKEYKCKVSNKGLPSSIEKTISKAKGQPREPQVTTLPPSREEMTKNQVSLTCLVKGFYPSDIAVEWESNGQPENNYKTFPPVLDSDGSFFLYSKLTVDKSRWQQGNVFSCSVMHEALHNHYTQKSLSLSGEC

SEQ ID NO: 161 - protein, 232 aa, Artificial Sequence
  Description of Artificial Sequence: Synthetic polypeptide
EPKSCDKTHTCPSCPAPEFLGGPSVFLFPPKPKDTLMISRTPEVTCVVVDVSQEDPEVQFNWYVDGVEVHNAKTKPREEQFNSKYRVVSVLTVLHQDWLNGKEYKCKVSNKGLPSSIEKTISKAKGQPREPQVTTLPPSREEMTKNQVSLTCLVKGFYPSDIAVEWESNGQPENNYKTFPPVLDSDGSFFLYSKLTVDKSRWQQGNVFSCSVMHEALHNHYTQKSLSLSGEC

SEQ ID NO: 162 - protein, 225 aa, Artificial Sequence
  Description of Artificial Sequence: Synthetic polypeptide
CPSCPAPEFLGGPSVFLFPPKPKDTLMISRTPEVTCVVVDVSQEDPEVQFNWYVDGVEVHNAKTKPREEQFNSKYRVVSVLTVLHQDWLNGKEYKCKVSNKGLPSSIEKTISKAKGQPREPQVYTLPPSREEMTKNQVHLTCLVKGFYPSDIAVEWESNGQPENNYKTTPPVLDSDGSFALYSKLTVDKSRWQQGNVFSCSVMHEALHNHYTQKSLSLSKSCDKT

SEQ ID NO: 163 - protein, 235 aa, Artificial Sequence
  Description of Artificial Sequence: Synthetic polypeptide
EPKSCDKTHTCPSCPAPEFLGGPSVFLFPPKPKDTLMISRTPEVTCVVVDVSQEDPEVQFNWYVDGVEVHNAKTKPREEQFNSKYRVVSVLTVLHQDWLNGKEYKCKVSNKGLPSSIEKTISKAKGQPREPQVYTLPPSREEMTKNQVSLTCLVDGFYPSDIAVEWESNGQPENNYDTTPPVLDSDGSFFLYSDLTVDKSRWQQGNVFSCSVMHEALHNHYTQKSLSLSKSCDKT

SEQ ID NO: 164 - protein, 222 aa, Artificial Sequence
  Description of Artificial Sequence: Synthetic polypeptide
CPSCPAPEFLGGPSVFLFPPKPKDTLMISRTPEVTCVVVDVSQEDPEVQFNWYVDGVEVHNAKTKPREEQFNSKYRVVSVLTVLHQDWLNGKEYKCKVSNKGLPSSIEKTISKAKGQPREPQVYTLPPSRKKMTKNQVSLTCLVKGFYPSDIAVEWESNGQPENNYKTTPPVLKSDGSFFLYSKLTVDKSRWQQGNVFSCSVMHEALHNHYTQKSLSLSGEC

SEQ ID NO: 165 - protein, 232 aa, Artificial Sequence
  Description of Artificial Sequence: Synthetic polypeptide
EPKSCDKTHTCPSCPAPEFLGGPSVFLFPPKPKDTLMISRTPEVTCVVVDVSQEDPEVQFNWYVDGVEVHNAKTKPREEQFNSKYRVVSVLTVLHQDWLNGKEYKCKVSNKGLPSSIEKTISKAKGQPREPQVYTLPPSRKKMTKNQVSLTCLVKGFYPSDIAVEWESNGQPENNYKTTPPVLKSDGSFFLYSKLTVDKSRWQQGNVFSCSVMHEALHNHYTQKSLSLSGEC

SEQ ID NO: 166 - protein, 225 aa, Artificial Sequence
  Description of Artificial Sequence: Synthetic polypeptide
CPSCPAPEFLGGPSVFLFPPKPKDTLMISRTPEVTCVVVDVSQEDPEVQFNWYVDGVEVHNAKTKPREEQFNSKYRVVSVLTVLHQDWLNGKEYKCKVSNKGLPSSIEKTISKAKGQPREPQVYTLPPSREEMTKNQVSLTCLVDGFYPSDIAVEWESNGQPENNYDTTPPVLDSDGSFFLYSDLTVDKSRWQQGNVFSCSVMHEALHNHYTQKSLSLSKSCDKT

SEQ ID NO: 167 - protein, 6 aa, Artificial Sequence
  Description of Artificial Sequence: Synthetic peptide
KSCDKT

SEQ ID NO: 168 - protein, 3 aa, Artificial Sequence
  Description of Artificial Sequence: Synthetic peptide
GEC

SEQ ID NO: 169 - protein, 40 aa, Artificial Sequence
  Description of Artificial Sequence: Synthetic polypeptide
TRPAPPSTATTAGSTPQPESASPSGKEPAASSPSSTNTGS

SEQ ID NO: 170 - DNA, 1482 bp, Artificial Sequence
  Description of Artificial Sequence: Synthetic polynucleotide
gaaccgaaatcatgcgataagacccacacatgccctccctgtccagcacccgagctgctcgggggaccctcggtgttcttgtttcctcccaaacccaaagatacccttatgattagccggacaccagaggtgacgtgcgtggtagtagacgtgtcccatgaggacccggaggtcaagttcaactggtacgtggacggagtggaggtgcacaatgcaaagaccaagccgagggaagagcaataccagtccacatatagagtcgtgtcggtccttacggtcttgcatcaggactggctgaatggcaaagaatacaaatgtaaagtctccaacaaagctctcccagcgcccattgagaaaacaatctcaaaagcgaaaggccaaccgagagaacctcaagtctatactcttcccccgtcgagagaggaaatgaccaaaaaccaggtatccctgtcatgcgcggtcaaggggttttacccaagcgacatcgccgtggagtgggagtcgaacggacagccagagaataactataagacgacccctcccgtgctggattcggatggatcgttctttcttgtcagcaaactcacagtcgacaaatcaaggtggcagcaagggaacgtgttcagctgttcggtaatgcatgaagccctccacaatcactacacgcagaaatccctgtcgctctcaccagggaagggtgggggtggctcagggggtgggggatcaggtggtggtggtagcggaggtggagggagcggaggcggaggctccggtggaggaggttccggaggtggcgggtcagggggaggagggtcatgtccgccgtgccctgcccccgaattgctgggaggtccgtccgtatttctgtttcccccgaagcctaaagatactcttatgatctcgcgaacgccggaagtaacttgtgtcgtggtagatgtctcacacgaagatcccgaagtgaaattcaattggtatgtcgacggcgtggaggtacataacgccaagacgaagcctagagaggaacagtaccagtcaacgtatcgggtcgtatccgtgctcaccgtgctccaccaggattggctgaacggaaaggagtacaagtgcaaagtctcgaacaaggcgttgcctgcgccaatcgaaaagacgatctccaaagctaagggacaaccaagggaaccacaagtgtatactctcccgccctcgcgcgaagagatgacaaagaatcaggtgtcactttggtgcttggtgaaggggttctatccctcggatattgcggtcgagtgggagagcaatggtcaaccggagaacaattacaagacgacaccgcccgtattggactccgacgggtccttctttctctactcgaagctcactgtagataagtcgcgatggcagcaggggaacgtctttagctgttccgtgatgcacgaggcacttcataaccactatacccagaagtcgttgtcgctttcccccggaaaa

SEQ ID NO: 171 - protein, 494 aa, Artificial Sequence
  Description of Artificial Sequence: Synthetic polypeptide
EPKSCDKTHTCPPCPAPELLGGPSVFLFPPKPKDTLMISRTPEVTCVVVDVSHEDPEVKFNWYVDGVEVHNAKTKPREEQYQSTYRVVSVLTVLHQDWLNGKEYKCKVSNKALPAPIEKTISKAKGQPREPQVYTLPPSREEMTKNQVSLSCAVKGFYPSDIAVEWESNGQPENNYKTTPPVLDSDGSFFLVSKLTVDKSRWQQGNVFSCSVMHEALHNHYTQKSLSLSPGKGGGGSGGGGSGGGGSGGGGSGGGGSGGGGSGGGGSGGGGSCPPCPAPELLGGPSVFLFPPKPKDTLMISRTPEVTCVVVDVSHEDPEVKFNWYVDGVEVHNAKTKPREEQYQSTYRVVSVLTVLHQDWLNGKEYKCKVSNKALPAPIEKTISKAKGQPREPQVYTLPPSREEMTKNQVSLWCLVKGFYPSDIAVEWESNGQPENNYKTTPPVLDSDGSFFLYSKLTVDKSRWQQGNVFSCSVMHEALHNHYTQKSLSLSPGK

SEQ ID NO: 172 - DNA, 1482 bp, Artificial Sequence
  Description of Artificial Sequence: Synthetic polynucleotide
gaaccgaaatcatgcgataaaactcacacgtgccctccatgccctgctccggaacttctcgggggaccgtccgtattcctctttcctcctaagcctaaggacaccctcatgatcagcaggacccccgaggtgacgtgtgtagtcgtggatgtgtcccacgaggacccggaagtcaagttcaactggtatgtagatggagtggaggtccataatgccaagaccaagccaagagaggagcagtatcagtcgacttatcgggtggtcagcgtcctcacggtacttcatcaggattggctgaatggaaaggagtacaaatgtaaggtatccaacaaagcgttgccagcgcccatcgaaaagacaatctcgaaggcgaagggacaaccccgggaaccgcaagtgtgtaccctgccaccttcccgggaggagatgacgaaaaaccaggtatccctgtcgtgcgccgtgaaagggttttacccatcggatatcgcagtggagtgggaaagcaatgggcagccggaaaacaactataagaccacgccccctgtactcgactcggatgggtcctttttcctcgtcagcaaacttacggtagacaaaagcaggtggcaacaggggaatgtgttcagctgctcagtcatgcacgaggcactccataaccattacactcagaaatcactgtcgctgtcgcccggtaaagggggaggtgggtcgggcggtgggggaagcggtggtgggggatcaggtgggggaggttcgggaggtggtgggagcggtggaggcggttccggaggaggcgggtcgggtggaggtggatcgtgcccaccgtgccccgcaccggaactccttgggggaccatccgtgtttctgtttccaccgaagccaaaggacactctcatgatctcgcgcacaccagaggtgacatgtgtcgtcgtcgatgtgtcacacgaagatccagaggtcaagtttaactggtacgtggacggagtcgaggtccacaatgcgaaaacgaaacccagagaagagcagtaccagtcaacataccgggtggtgagcgtattgaccgtgcttcaccaggactggcttaacgggaaagagtacaagtgtaaggtcagcaataaggcgctcccagcgcctattgagaaaactatctcgaaagcaaaggggcagccacgagagccccaagtgtgtacgctgccaccctgtcgggaggaaatgaccaagaatcaagtctcgctttggtgccttgtgaagggattctatcccagcgacattgctgtagagtgggagtcgaacgggcaacccgagaataactacaagactactccgccggtgttggactcggacgggtcgttcttcctttatagcaaactcacagtcgacaagtccagatggcagcagggaaatgtcttttcctgctcggtaatgcacgaagcgttgcataaccactatacacagaagtcgctttcgttgtcacccgggaaa

SEQ ID NO: 173 - protein, 494 aa, Artificial Sequence
  Description of Artificial Sequence: Synthetic polypeptide
EPKSCDKTHTCPPCPAPELLGGPSVFLFPPKPKDTLMISRTPEVTCVVVDVSHEDPEVKFNWYVDGVEVHNAKTKPREEQYQSTYRVVSVLTVLHQDWLNGKEYKCKVSNKALPAPIEKTISKAKGQPREPQVCTLPPSREEMTKNQVSLSCAVKGFYPSDIAVEWESNGQPENNYKTTPPVLDSDGSFFLVSKLTVDKSRWQQGNVFSCSVMHEALHNHYTQKSLSLSPGKGGGGSGGGGSGGGGSGGGGSGGGGSGGGGSGGGGSGGGGSCPPCPAPELLGGPSVFLFPPKPKDTLMISRTPEVTCVVVDVSHEDPEVKFNWYVDGVEVHNAKTKPREEQYQSTYRVVSVLTVLHQDWLNGKEYKCKVSNKALPAPIEKTISKAKGQPREPQVYTLPPCREEMTKNQVSLWCLVKGFYPSDIAVEWESNGQPENNYKTTPPVLDSDGSFFLYSKLTVDKSRWQQGNVFSCSVMHEALHNHYTQKSLSLSPGK

SEQ ID NO: 174 - DNA, 1482 bp, Artificial Sequence
  Description of Artificial Sequence: Synthetic polynucleotide
gaaccgaaatcatgcgacaaaacgcacacttgtccgccgtgccctgccccagagttgcttggaggaccatcagtatttctcttccctcctaagccgaaagacacactcatgatctcacgcacaccggaagtaacttgcgtggtggtggatgtgtcgcatgaagatcccgaggtcaaattcaactggtacgtcgacggtgtggaggtgcacaacgccaagacgaaacccagagaagagcagtatcagtcgacctaccgagtggtatccgtgcttacggtgctgcatcaggattggttgaatggaaaagaatacaaatgcaaagtctcgaataaggcgctcccagccccaatcgaaaagacgatttccaaggcgaaggggcagcctcgggaacctcaggtctatacccttcctccgtcacgcgaggaaatgacaaagaatcaggtcagcctcacatgcctcgtgaagggattctatccgtcggatattgctgtcgagtgggaatcgaacggacagcccgagaacaattacaaaacaactcctcccgtacttgactcggacgggagctttttccttacgtcaaagctgaccgtcgataaaagcaggtggcagcaagggaatgtgttttcgtgctcggtcatgcacgaagcacttcataaccactacacccagaaatccttgagcctgtcaccggggaagggaggagggggtagcggcggtggagggagcggaggaggcgggtccggtgggggtgggtccgggggtggcggaagcggtggcggaggttcgggagggggaggaagcggagggggtggatcgtgtcctccgtgcccagcccccgaactcctcgggggaccctcggtattcctttttccgccgaaacccaaggacactttgatgattagccggacgcccgaggtgacatgcgtggtcgtggatgtatcgcatgaggaccccgaagtgaagttcaattggtacgtggatggggtggaagtccataacgcaaagaccaagcccagagaggagcagtaccaatcgacgtatagggtcgtgtccgtcctcacagtcttgcaccaggactggttgaacgggaaggagtataagtgtaaggtcagcaacaaagcgttgcctgcgcccattgaaaagactatctcaaaagcaaagggacagcccagggagccccaagtgtacacactgcccccgtcaagagaagaaatgaccaaaaatcaagtgtccctctactgcttggtgaaggggttctatcccagcgacatcgcggtagagtgggagtcaaatggccagcccgaaaacaactacaaaacgacaccgcccgtgttggattcggatgggtcattctttctgtattcaaaactgacagtggacaagtcgcggtggcaacaggggaacgtgttttcctgttccgtaatgcacgaggcgttgcacaatcactatacgcagaagtccctctcgctttcacccgggaag

SEQ ID NO: 175 - protein, 494 aa, Artificial Sequence
  Description of Artificial Sequence: Synthetic polypeptide
EPKSCDKTHTCPPCPAPELLGGPSVFLFPPKPKDTLMISRTPEVTCVVVDVSHEDPEVKFNWYVDGVEVHNAKTKPREEQYQSTYRVVSVLTVLHQDWLNGKEYKCKVSNKALPAPIEKTISKAKGQPREPQVYTLPPSREEMTKNQVSLTCLVKGFYPSDIAVEWESNGQPENNYKTTPPVLDSDGSFFLTSKLTVDKSRWQQGNVFSCSVMHEALHNHYTQKSLSLSPGKGGGGSGGGGSGGGGSGGGGSGGGGSGGGGSGGGGSGGGGSCPPCPAPELLGGPSVFLFPPKPKDTLMISRTPEVTCVVVDVSHEDPEVKFNWYVDGVEVHNAKTKPREEQYQSTYRVVSVLTVLHQDWLNGKEYKCKVSNKALPAPIEKTISKAKGQPREPQVYTLPPSREEMTKNQVSLYCLVKGFYPSDIAVEWESNGQPENNYKTTPPVLDSDGSFFLYSKLTVDKSRWQQGNVFSCSVMHEALHNHYTQKSLSLSPGK

SEQ ID NO: 176 - DNA, 1482 bp, Artificial Sequence
  Description of Artificial Sequence: Synthetic polynucleotide
gaaccgaaatcatgcgataagacttgctgctgtcctccctgtccagcacccgagctgctcgggggaccctcggtgttcttgtttcctcccaaacccaaagatacccttatgattagccggacaccagaggtgacgtgcgtggtagtagacgtgtcccatgaggacccggaggtcaagttcaactggtacgtggacggagtggaggtgcacaatgcaaagaccaagccgagggaagagcaataccagtccacatatagagtcgtgtcggtccttacggtcttgcatcaggactggctgaatggcaaagaatacaaatgtaaagtctccaacaaagctctcccagcgcccattgagaaaacaatctcaaaagcgaaaggccaaccgagagaacctcaagtctatactcttcccccgtcgagagaggaaatgaccaaaaatcaggtatccctgtcatgcgcggtcaaggggttttacccaagcgacatcgccgtggagtgggagtcgaacggacagccagagaataactataagacgacccctcccgtgctggattcggatggatcgttctttcttgtcagcaaactcacagtcgacaaatcaaggtggcagcaagggaacgtgttcagctgttcggtaatgcatgaagccctccacaatcactacacgcagaaatccctgtcgctctcaccagggaagggtgggggtggctcagggggtgggggatcaggtggtggtggtagcggaggtggagggagcggaggcggaggctccggtggaggaggttccggaggtggcgggtcagggggaggagggtcatgtccgccgtgccctgcccccgaattgctgggaggtccgtccgtatttctgtttcccccgaagcctaaagatactcttatgatctcgcgaacgccggaagtaacttgtgtcgtggtagatgtctcacacgaagatcccgaagtgaaattcaattggtatgtcgacggcgtggaggtacataacgccaagacgaagcctagagaggaacagtaccagtcaacgtatcgggtcgtatccgtgctcaccgtgctccaccaggattggctgaacggaaaggagtacaagtgcaaagtctcgaacaaggcgttgcctgcgccaatcgaaaagacgatctccaaagctaagggacaaccaagggaaccacaagtgtatactctcccgccctcgcgcgaagagatgacaaagaatcaggtgtcactttggtgcttggtgaaggggttctatccctcggatattgcggtcgagtgggagagcaatggtcaaccggagaacaattacaagacgacaccgcccgtattggactccgacgggtccttctttctctactcgaagctcactgtagataagtcgcgatggcagcaggggaacgtctttagctgttccgtgatgcacgaggcacttcataaccactatacccagaagtcgttgtcgctttcccccggaaaa

SEQ ID NO: 177 - protein, 494 aa, Artificial Sequence
  Description of Artificial Sequence: Synthetic polypeptide
EPKSCDKTCCCPPCPAPELLGGPSVFLFPPKPKDTLMISRTPEVTCVVVDVSHEDPEVKFNWYVDGVEVHNAKTKPREEQYQSTYRVVSVLTVLHQDWLNGKEYKCKVSNKALPAPIEKTISKAKGQPREPQVYTLPPSREEMTKNQVSLSCAVKGFYPSDIAVEWESNGQPENNYKTTPPVLDSDGSFFLVSKLTVDKSRWQQGNVFSCSVMHEALHNHYTQKSLSLSPGKGGGGSGGGGSGGGGSGGGGSGGGGSGGGGSGGGGSGGGGSCPPCPAPELLGGPSVFLFPPKPKDTLMISRTPEVTCVVVDVSHEDPEVKFNWYVDGVEVHNAKTKPREEQYQSTYRVVSVLTVLHQDWLNGKEYKCKVSNKALPAPIEKTISKAKGQPREPQVYTLPPSREEMTKNQVSLWCLVKGFYPSDIAVEWESNGQPENNYKTTPPVLDSDGSFFLYSKLTVDKSRWQQGNVFSCSVMHEALHNHYTQKSLSLSPGK

SEQ ID NO: 178 - DNA, 1482 bp, Artificial Sequence
  Description of Artificial Sequence: Synthetic polynucleotide
gaaccgaaatcatgcgataagtgccacacatgccctccctgtccagcacccgagctgctcgggggaccctcggtgttcttgtttcctcccaaacccaaagatacccttatgattagccggacaccagaggtgacgtgcgtggtagtagacgtgtcccatgaggacccggaggtcaagttcaactggtacgtggacggagtggaggtgcacaatgcaaagaccaagccgagggaagagcaataccagtccacatatagagtcgtgtcggtccttacggtcttgcatcaggactggctgaatggcaaagaatacaaatgtaaagtctccaacaaagctctcccagcgcccattgagaaaacaatctcaaaagcgaaaggccaaccgagagaacctcaagtctatactcttcccccgtcgagagaggaaatgaccaaaaaccaggtatccctgtcatgcgcggtcaaggggttttacccaagcgacatcgccgtggagtgggagtcgaacggacagccagagaataactataagacgacccctcccgtgctggattcggatggatcgttctttcttgtcagcaaactcacagtcgacaaatcaaggtggcagcaagggaacgtgttcagctgttcggtaatgcatgaagccctccacaatcactacacgcagaaatccctgtcgctctcaccagggaagggtgggggtggctcagggggtgggggatcaggtggtggtggtagcggaggtggagggagcggaggcggaggctccggtggaggaggttccggaggtggcgggtcagggggaggagggtcatgtccgccgtgccctgcccccgaattgctgggaggtccgtccgtatttctgtttcccccgaagcctaaagatactcttatgatctcgcgaacgccggaagtaacttgtgtcgtggtagatgtctcacacgaagatcccgaagtgaaattcaattggtatgtcgacggcgtggaggtacataacgccaagacgaagcctagagaggaacagtaccagtcaacgtatcgggtcgtatccgtgctcaccgtgctccaccaggattggctgaacggaaaggagtacaagtgcaaagtctcgaacaaggcgttgcctgcgccaatcgaaaagacgatctccaaagctaagggacaaccaagggaaccacaagtgtatactctcccgccctcgcgcgaagagatgacaaagaatcaggtgtcactttggtgcttggtgaaggggttctatccctcggatattgcggtcgagtgggagagcaatggtcaaccggagaacaattacaagacgacaccgcccgtattggactccgacgggtccttctttctctactcgaagctcactgtagataagtcgcgatggcagcaggggaacgtctttagctgttccgtgatgcacgaggcacttcataaccactatacccagaagtcgttgtcgctttcccccggaaaa

SEQ ID NO: 179 - protein, 494 aa, Artificial Sequence
  Description of Artificial Sequence: Synthetic polypeptide
EPKSCDKCHTCPPCPAPELLGGPSVFLFPPKPKDTLMISRTPEVTCVVVDVSHEDPEVKFNWYVDGVEVHNAKTKPREEQYQSTYRVVSVLTVLHQDWLNGKEYKCKVSNKALPAPIEKTISKAKGQPREPQVYTLPPSREEMTKNQVSLSCAVKGFYPSDIAVEWESNGQPENNYKTTPPVLDSDGSFFLVSKLTVDKSRWQQGNVFSCSVMHEALHNHYTQKSLSLSPGKGGGGSGGGGSGGGGSGGGGSGGGGSGGGGSGGGGSGGGGSCPPCPAPELLGGPSVFLFPPKPKDTLMISRTPEVTCVVVDVSHEDPEVKFNWYVDGVEVHNAKTKPREEQYQSTYRVVSVLTVLHQDWLNGKEYKCKVSNKALPAPIEKTISKAKGQPREPQVYTLPPSREEMTKNQVSLWCLVKGFYPSDIAVEWESNGQPENNYKTTPPVLDSDGSFFLYSKLTVDKSRWQQGNVFSCSVMHEALHNHYTQKSLSLSPGK

SEQ ID NO: 180 - DNA, 1491 bp, Artificial Sequence
  Description of Artificial Sequence: Synthetic polynucleotide
gaaccgaaatcatgcgataaaacacacacatgcccaccatgcccagcgcctgaacttttgggaggtccctcggtgtttttgtttcctcctaagcctaaggacaccctgatgatctcccgcactccggaagtgacgtgtgtcgtagtcgacgtcagccatgaggaccctgaggtgaaattcaactggtacgtagatggtgtggaggtgcataatgcaaaaactaagcctcgggaggaacaatatcaaagcacataccgggtcgtgtccgtgctcacggtacttcatcaggattggctcaacgggaaagaatacaaatgtaaggtgtccaacaaggctctcccggcaccgattgagaaaacgatcagcaaggccaaggggcagccccgagaaccccaagtatacacacttcccccgtccagggaggagatgaccaagaaccaggtgtcgctgtcgtgtgcggtcaaggggttttatcccagcgacatcgcggtagagtgggagtcgaacggccagcccgagaacaactacaagacaacaccgcctgtattggactcggacgggtcgtttttcctggtcagcaagctcacagtggataaaagccgctggcagcaggggaatgtattctcctgctccgtcatgcacgaggcgcttcacaaccattacacgcaaaaatccctgtccttgtccaagtcatgcgacaagacgggaggaggagggtcaggcggaggaggaagcgggggtggagggtccggtggtggtgggagcggaggtggagggagcggtggaggtggtagcgggggaggtggatcgggagggggtgggagctgtccgccatgtccagccccggaacttctcgggggaccgtcagtctttctttttccgccgaagcccaaggacaccttgatgattagccgcacgccggaggtcacgtgcgtagtagtggatgtatcccacgaggaccccgaggtcaaattcaattggtatgtcgacggagtggaagtacacaacgcaaagacaaagccgagagaagagcagtaccaatccacttatagggtagtctcggtcttgacagtactgcaccaggactggcttaatggaaaggaatacaagtgcaaagtctcaaacaaagccctccccgcacccatcgaaaagacaatctcgaaagcgaaaggacagcccagagagcctcaagtgtataccctgcccccgtcaagagaagagatgacgaagaaccaagtgtccctctggtgtctcgtgaaaggtttttaccccagcgatattgccgtcgaatgggaaagcaatggtcagcccgaaaacaattacaagactacgcctcccgtattggattcggatggttcgttcttcttgtactcaaagcttactgtcgataagtcgcggtggcagcaaggcaatgtgtttagctgttcggtaatgcatgaggcgctccacaatcactatacacagaagagcttgtccctcagcggggagtgc

SEQ ID NO: 181 - protein, 497 aa, Artificial Sequence
  Description of Artificial Sequence: Synthetic polypeptide
EPKSCDKTHTCPPCPAPELLGGPSVFLFPPKPKDTLMISRTPEVTCVVVDVSHEDPEVKFNWYVDGVEVHNAKTKPREEQYQSTYRVVSVLTVLHQDWLNGKEYKCKVSNKALPAPIEKTISKAKGQPREPQVYTLPPSREEMTKNQVSLSCAVKGFYPSDIAVEWESNGQPENNYKTTPPVLDSDGSFFLVSKLTVDKSRWQQGNVFSCSVMHEALHNHYTQKSLSLSKSCDKTGGGGSGGGGSGGGGSGGGGSGGGGSGGGGSGGGGSGGGGSCPPCPAPELLGGPSVFLFPPKPKDTLMISRTPEVTCVVVDVSHEDPEVKFNWYVDGVEVHNAKTKPREEQYQSTYRVVSVLTVLHQDWLNGKEYKCKVSNKALPAPIEKTISKAKGQPREPQVYTLPPSREEMTKNQVSLWCLVKGFYPSDIAVEWESNGQPENNYKTTPPVLDSDGSFFLYSKLTVDKSRWQQGNVFSCSVMHEALHNHYTQKSLSLSGEC

SEQ ID NO: 182 - DNA, 1422 bp, Artificial Sequence
  Description of Artificial Sequence: Synthetic polynucleotide
gaaccgaaatcatgcgacaagacccacacctgcccaccgtgtccagcgcccgagctcctcggagggccgtcggtgttcctctttcccccaaagcctaaagacactctgatgatcagccgcactccagaagtgacatgtgtggtggtggatgtctcgcatgaggacccggaagtcaaattcaattggtacgtggatggtgtcgaagtgcacaacgccaagacaaaaccgcgcgaggagcagtaccagagcacctaccgggtggtatcagtgcttacagtactgcatcaggattggctgaacggaaaggagtacaagtgtaaagtcagcaacaaagcgctcccggctccgatcgagaaaacgatctcaaaggccaagggccagccgcgagaaccccaagtatacacgttgcccccttcaagggaggaaatgaccaagaatcaggtgtcactgagctgcgccgtcaagggattctacccctcggacattgcagtagagtgggagtcgaatgggcaacccgaaaacaactataagacgacacccccggtcctcgactcagatggatcgttcttccttgtatcaaaattgacggtcgacaagagccggtggcagcaaggtaacgtattttcgtgttcggtgatgcatgaagcgctgcataaccactatacgcagaagagcttgtccttgtcaccaggcaagggaggtgggggttcgggcggaggaggtagcggcggagggggtagcggaggtggcgggtcctgtcccccgtgccccgcaccggagctgctgggaggtccgtcagtgtttttgtttcctcccaagccgaaagacacgctgatgatctcgaggacgcccgaggtaacgtgcgtcgtcgtcgatgtatcccacgaagatcccgaggtcaagttcaactggtatgtagatggggtcgaagtccataacgctaagacaaagccgagagaggaacaatatcagtcaacttatcgggtcgtgtcggtcctgaccgtacttcaccaggactggctcaatgggaaagagtacaaatgcaaggtgtccaataaggcgctgcctgcgccaattgagaaaactatctcgaaagcgaagggacagcccagagagccgcaagtatatacactgccaccctcgagagaagaaatgacgaagaatcaagtctccttgtggtgtttggtgaaggggttttacccttcagacatcgcagtggaatgggaatcgaacgggcagccagaaaacaattacaaaaccacacctcctgtccttgactccgatggctcatttttcctctattcgaagctcactgtcgacaagtcgcgctggcagcagggtaacgtctttagctgctccgtgatgcacgaggccctccacaatcattatacacagaaatcgctgtcactttcgcccggaaaa

SEQ ID NO: 183 - protein, 474 aa, Artificial Sequence
  Description of Artificial Sequence: Synthetic polypeptide
EPKSCDKTHTCPPCPAPELLGGPSVFLFPPKPKDTLMISRTPEVTCVVVDVSHEDPEVKFNWYVDGVEVHNAKTKPREEQYQSTYRVVSVLTVLHQDWLNGKEYKCKVSNKALPAPIEKTISKAKGQPREPQVYTLPPSREEMTKNQVSLSCAVKGFYPSDIAVEWESNGQPENNYKTTPPVLDSDGSFFLVSKLTVDKSRWQQGNVFSCSVMHEALHNHYTQKSLSLSPGKGGGGSGGGGSGGGGSGGGGSCPPCPAPELLGGPSVFLFPPKPKDTLMISRTPEVTCVVVDVSHEDPEVKFNWYVDGVEVHNAKTKPREEQYQSTYRVVSVLTVLHQDWLNGKEYKCKVSNKALPAPIEKTISKAKGQPREPQVYTLPPSREEMTKNQVSLWCLVKGFYPSDIAVEWESNGQPENNYKTTPPVLDSDGSFFLYSKLTVDKSRWQQGNVFSCSVMHEALHNHYTQKSLSLSPGK

SEQ ID NO: 184 - DNA, 1476 bp, Artificial Sequence
  Description of Artificial Sequence: Synthetic polynucleotide
gaaccgaaatcatgcgacaaaacgcacacctgtccgccctgtcctgccccggaacttctcggagggccttccgtgtttctcttccctccgaagcccaaggacacgctgatgatctcccggaccccggaggtcacgtgtgtggtagtagacgtgtcacacgaagatccggaggtgaagttcaactggtacgtagatggcgtggaggtgcacaacgccaaaacgaagccccgagaggaacagtaccagtcaacgtaccgcgtcgtgtcggtattgactgtattgcatcaagactggttgaacgggaaggagtataagtgtaaagtcagcaacaaggctcttcccgcacccattgaaaagacaatttcgaaagccaaaggccagcccagggagccccaagtgtacaccctgccacccagccgggaagagatgacaaagaatcaagtctcgcttagctgcgctgtcaagggcttctatccatcggacattgcagtggaatgggaatcaaacggacagccggagaataactataagacgacaccccctgtcctcgacagcgacgggtcgttcttccttgtgagcaagctcacggtcgacaaaagccgctggcagcagggaaacgtattctcatgttcggtgatgcacgaagcattgcataaccactacacgcagaagagcttgtcgttgagcaaatcatgcgacaagaccgggggtggtgggagcggcggaggaggtagcggcggaggtggctcgggaggaggtgggtcgggtggtgggggaagcggaggcggagggagcggaggtggtgggtcatgtccgccgtgcccggcacccgaactgctcggaggtccctcggtgttcctgttcccgccaaagcctaaggatacgttgatgatttcgcgcacgccggaggtaacatgcgtggtggtggatgtgtcacatgaggaccccgaggtcaagttcaattggtacgtcgatggagtggaagtgcacaatgcgaaaacaaaaccccgggaggagcagtatcagagcacgtacagggtagtctccgtcctgactgtacttcaccaagactggcttaacggaaaagagtataagtgcaaggtcagcaacaaggcgcttcctgcccctatcgagaaaaccatctcgaaggccaagggacagccgagggagcctcaagtatacacgctgccgccatcgagagaagaaatgaccaaaaaccaggtgtccctttggtgtttggtgaagggtttctatccctccgatatcgccgtagagtgggagtcaaatggacagcctgagaacaactataagactacgccccctgtgttggacagcgatgggtcattctttctgtattcgaaactcacggtggataagtcgcgatggcaacagggcaatgtgttttcgtgcagcgtgatgcatgaggcgctgcacaaccactatactcagaaatcgttaagcttatcgggagagtgt

SEQ ID NO: 185 - protein, 492 aa, Artificial Sequence
  Description of Artificial Sequence: Synthetic polypeptide
EPKSCDKTHTCPPCPAPELLGGPSVFLFPPKPKDTLMISRTPEVTCVVVDVSHEDPEVKFNWYVDGVEVHNAKTKPREEQYQSTYRVVSVLTVLHQDWLNGKEYKCKVSNKALPAPIEKTISKAKGQPREPQVYTLPPSREEMTKNQVSLSCAVKGFYPSDIAVEWESNGQPENNYKTTPPVLDSDGSFFLVSKLTVDKSRWQQGNVFSCSVMHEALHNHYTQKSLSLSKSCDKTGGGGSGGGGSGGGGSGGGGSGGGGSGGGGSGGGGSCPPCPAPELLGGPSVFLFPPKPKDTLMISRTPEVTCVVVDVSHEDPEVKFNWYVDGVEVHNAKTKPREEQYQSTYRVVSVLTVLHQDWLNGKEYKCKVSNKALPAPIEKTISKAKGQPREPQVYTLPPSREEMTKNQVSLWCLVKGFYPSDIAVEWESNGQPENNYKTTPPVLDSDGSFFLYSKLTVDKSRWQQGNVFSCSVMHEALHNHYTQKSLSLSGEC

SEQ ID NO: 186 - DNA, 1476 bp, Artificial Sequence
  Description of Artificial Sequence: Synthetic polynucleotide
gaaccgaaatcatgcgacaaaacgcacacctgtccgccctgtcctgccccggaacttctcggagggccttccgtgtttctcttccctccgaagcccaaggacacgctgatgatctcccggaccccggaggtcacgtgtgtggtagtagacgtgtcacacgaagatccggaggtgaagttcaactggtacgtagatggcgtggaggtgcacaacgccaaaacgaagccccgagaggaacagtaccagtcaacgtaccgcgtcgtgtcggtattgactgtattgcatcaagactggttgaacgggaaggagtataagtgtaaagtcagcaacaaggctcttcccgcacccattgaaaagacaatttcgaaagccaaaggccagcccagggagccccaagtgtacaccctgccacccagccgggaagagatgacaaagaatcaagtctcgcttagctgcgctgtcaagggcttctatccatcggacattgcagtggaatgggaatcaaacggacagccggagaataactataagacgacaccccctgtcctcgacagcgacgggtcgttcttccttgtgagcaagctcacggtcgacaaaagccgctggcagcagggaaacgtattctcatgttcggtgatgcacgaagcattgcataaccactacacgcagaagagcttgtcgttgagcggggaatgcggagggggagggtccgggggtggtgggagcggcggaggaggtagcggcggaggtggctcgggaggaggtgggtcgggtggtgggggaagcggaggcggagggtcatgtccgccgtgcccggcacccgaactgctcggaggtccctcggtgttcctgttcccgccaaagcctaaggatacgttgatgatttcgcgcacgccggaggtaacatgcgtggtggtggatgtgtcacatgaggaccccgaggtcaagttcaattggtacgtcgatggagtggaagtgcacaatgcgaaaacaaaaccccgggaggagcagtatcagagcacgtacagggtagtctccgtcctgactgtacttcaccaagactggcttaacggaaaagagtataagtgcaaggtcagcaacaaggcgcttcctgcccctatcgagaaaaccatctcgaaggccaagggacagccgagggagcctcaagtatacacgctgccgccatcgagagaagaaatgaccaaaaaccaggtgtccctttggtgtttggtgaagggtttctatccctccgatatcgccgtagagtgggagtcaaatggacagcctgagaacaactataagactacgccccctgtgttggacagcgatgggtcattctttctgtattcgaaactcacggtggataagtcgcgatggcaacagggcaatgtgttttcgtgcagcgtgatgcatgaggcgctgcacaaccactatactcagaaatcgttaagcttatcgaagtcatgcgacaagact

SEQ ID NO: 187 - protein, 492 aa, Artificial Sequence
  Description of Artificial Sequence: Synthetic polypeptide
EPKSCDKTHTCPPCPAPELLGGPSVFLFPPKPKDTLMISRTPEVTCVVVDVSHEDPEVKFNWYVDGVEVHNAKTKPREEQYQSTYRVVSVLTVLHQDWLNGKEYKCKVSNKALPAPIEKTISKAKGQPREPQVYTLPPSREEMTKNQVSLSCAVKGFYPSDIAVEWESNGQPENNYKTTPPVLDSDGSFFLVSKLTVDKSRWQQGNVFSCSVMHEALHNHYTQKSLSLSGECGGGGSGGGGSGGGGSGGGGSGGGGSGGGGSGGGGSCPPCPAPELLGGPSVFLFPPKPKDTLMISRTPEVTCVVVDVSHEDPEVKFNWYVDGVEVHNAKTKPREEQYQSTYRVVSVLTVLHQDWLNGKEYKCKVSNKALPAPIEKTISKAKGQPREPQVYTLPPSREEMTKNQVSLWCLVKGFYPSDIAVEWESNGQPENNYKTTPPVLDSDGSFFLYSKLTVDKSRWQQGNVFSCSVMHEALHNHYTQKSLSLSKSCDKT

SEQ ID NO: 188 - DNA, 1461 bp, Artificial Sequence
  Description of Artificial Sequence: Synthetic polynucleotide
gaaccgaaatcatgcgacaaaacgcacacctgtccgccctgtcctgccccggaacttctcggagggccttccgtgtttctcttccctccgaagcccaaggacacgctgatgatctcccggaccccggaggtcacgtgtgtggtagtagacgtgtcacacgaagatccggaggtgaagttcaactggtacgtagatggcgtggaggtgcacaacgccaaaacgaagccccgagaggaacagtaccagtcaacgtaccgcgtcgtgtcggtattgactgtattgcatcaagactggttgaacgggaaggagtataagtgtaaagtcagcaacaaggctcttcccgcacccattgaaaagacaatttcgaaagccaaaggccagcccagggagccccaagtgtacaccctgccacccagccgggaagagatgacaaagaatcaagtctcgcttagctgcgctgtcaagggcttctatccatcggacattgcagtggaatgggaatcaaacggacagccggagaataactataagacgacaccccctgtcctcgacagcgacgggtcgttcttccttgtgagcaagctcacggtcgacaaaagccgctggcagcagggaaacgtattctcatgttcggtgatgcacgaagcattgcataaccactacacgcagaagagcttgtcgttgagcaaatcatgcgacaagaccgggggtggtgggagcggcggaggaggtagcggcggaggtggctcgggaggaggtgggtcgggtggtgggggaagcggaggcggagggtcatgtccgccgtgcccggcacccgaactgctcggaggtccctcggtgttcctgttcccgccaaagcctaaggatacgttgatgatttcgcgcacgccggaggtaacatgcgtggtggtggatgtgtcacatgaggaccccgaggtcaagttcaattggtacgtcgatggagtggaagtgcacaatgcgaaaacaaaaccccgggaggagcagtatcagagcacgtacagggtagtctccgtcctgactgtacttcaccaagactggcttaacggaaaagagtataagtgcaaggtcagcaacaaggcgcttcctgcccctatcgagaaaaccatctcgaaggccaagggacagccgagggagcctcaagtatacacgctgccgccatcgagagaagaaatgaccaaaaaccaggtgtccctttggtgtttggtgaagggtttctatccctccgatatcgccgtagagtgggagtcaaatggacagcctgagaacaactataagactacgccccctgtgttggacagcgatgggtcattctttctgtattcgaaactcacggtggataagtcgcgatggcaacagggcaatgtgttttcgtgcagcgtgatgcatgaggcgctgcacaaccactatactcagaaatcgttaagcttatcgggagagtgt

SEQ ID NO: 189 - protein, 487 aa, Artificial Sequence
  Description of Artificial Sequence: Synthetic polypeptide
EPKSCDKTHTCPPCPAPELLGGPSVFLFPPKPKDTLMISRTPEVTCVVVDVSHEDPEVKFNWYVDGVEVHNAKTKPREEQYQSTYRVVSVLTVLHQDWLNGKEYKCKVSNKALPAPIEKTISKAKGQPREPQVYTLPPSREEMTKNQVSLSCAVKGFYPSDIAVEWESNGQPENNYKTTPPVLDSDGSFFLVSKLTVDKSRWQQGNVFSCSVMHEALHNHYTQKSLSLSKSCDKTGGGGSGGGGSGGGGSGGGGSGGGGSGGGGSCPPCPAPELLGGPSVFLFPPKPKDTLMISRTPEVTCVVVDVSHEDPEVKFNWYVDGVEVHNAKTKPREEQYQSTYRVVSVLTVLHQDWLNGKEYKCKVSNKALPAPIEKTISKAKGQPREPQVYTLPPSREEMTKNQVSLWCLVKGFYPSDIAVEWESNGQPENNYKTTPPVLDSDGSFFLYSKLTVDKSRWQQGNVFSCSVMHEALHNHYTQKSLSLSGEC

SEQ ID NO: 190 - DNA, 1446 bp, Artificial Sequence
  Description of Artificial Sequence: Synthetic polynucleotide
gaaccgaaatcatgcgacaaaacgcacacctgtccgccctgtcctgccccggaacttctcggagggccttccgtgtttctcttccctccgaagcccaaggacacgctgatgatctcccggaccccggaggtcacgtgtgtggtagtagacgtgtcacacgaagatccggaggtgaagttcaactggtacgtagatggcgtggaggtgcacaacgccaaaacgaagccccgagaggaacagtaccagtcaacgtaccgcgtcgtgtcggtattgactgtattgcatcaagactggttgaacgggaaggagtataagtgtaaagtcagcaacaaggctcttcccgcacccattgaaaagacaatttcgaaagccaaaggccagcccagggagccccaagtgtacaccctgccacccagccgggaagagatgacaaagaatcaagtctcgcttagctgcgctgtcaagggcttctatccatcggacattgcagtggaatgggaatcaaacggacagccggagaataactataagacgacaccccctgtcctcgacagcgacgggtcgttcttccttgtgagcaagctcacggtcgacaaaagccgctggcagcagggaaacgtattctcatgttcggtgatgcacgaagcattgcataaccactacacgcagaagagcttgtcgttgagcaaatcatgcgacaagaccgggggtggtgggagcggcggaggaggtagcggcggaggtggctcgggaggaggtgggtcgggtggtgggggatcatgtccgccgtgcccggcacccgaactgctcggaggtccctcggtgttcctgttcccgccaaagcctaaggatacgttgatgatttcgcgcacgccggaggtaacatgcgtggtggtggatgtgtcacatgaggaccccgaggtcaagttcaattggtacgtcgatggagtggaagtgcacaatgcgaaaacaaaaccccgggaggagcagtatcagagcacgtacagggtagtctccgtcctgactgtacttcaccaagactggcttaacggaaaagagtataagtgcaaggtcagcaacaaggcgcttcctgcccctatcgagaaaaccatctcgaaggccaagggacagccgagggagcctcaagtatacacgctgccgccatcgagagaagaaatgaccaaaaaccaggtgtccctttggtgtttggtgaagggtttctatccctccgatatcgccgtagagtgggagtcaaatggacagcctgagaacaactataagactacgccccctgtgttggacagcgatgggtcattctttctgtattcgaaactcacggtggataagtcgcgatggcaacagggcaatgtgttttcgtgcagcgtgatgcatgaggcgctgcacaaccactatactcagaaatcgttaagcttatcgggagagtgt

SEQ ID NO: 191 - protein, 482 aa, Artificial Sequence
  Description of Artificial Sequence: Synthetic polypeptide
EPKSCDKTHTCPPCPAPELLGGPSVFLFPPKPKDTLMISRTPEVTCVVVDVSHEDPEVKFNWYVDGVEVHNAKTKPREEQYQSTYRVVSVLTVLHQDWLNGKEYKCKVSNKALPAPIEKTISKAKGQPREPQVYTLPPSREEMTKNQVSLSCAVKGFYPSDIAVEWESNGQPENNYKTTPPVLDSDGSFFLVSKLTVDKSRWQQGNVFSCSVMHEALHNHYTQKSLSLSKSCDKTGGGGSGGGGSGGGGSGGGGSGGGGSCPPCPAPELLGGPSVFLFPPKPKDTLMISRTPEVTCVVVDVSHEDPEVKFNWYVDGVEVHNAKTKPREEQYQSTYRVVSVLTVLHQDWLNGKEYKCKVSNKALPAPIEKTISKAKGQPREPQVYTLPPSREEMTKNQVSLWCLVKGFYPSDIAVEWESNGQPENNYKTTPPVLDSDGSFFLYSKLTVDKSRWQQGNVFSCSVMHEALHNHYTQKSLSLSGEC

SEQ ID NO: 192 - DNA, 1491 bp, Artificial Sequence
  Description of Artificial Sequence: Synthetic polynucleotide
gaaccgaaatcatgcgacaaaacgcacacttgtccgccctgccctgcgcccgaactgcttggaggcccttcggtgtttttgtttccgcccaagcctaaggacaccttgatgatcagccggacaccggaggtcacatgtgtcgtcgtggatgtctcgcacgaggatcccgaggtcaagtttaactggtatgtggatggagtggaggtccacaacgccaaaaccaagcccagggaggagcaataccagtcaacctatcgggtagtctcggtgctgacggtactgcaccaggactggttgaatggaaaagagtacaaatgcaaggtatcaaacaaggcccttcccgctcccatcgaaaagacgatcagcaaagcgaaagggcaacccagagagccccaagtctatacgctgcctccctcaagggaagaaatgacgaaaaaccaggtgcacttgacatgcctcgtgaaaggcttctacccgagcgacattgcggtggaatgggagtcaaatggtcagccggaaaacaactacaagacaactccaccggtccttgattcagacgggtcgttcgccctctatagcaaactcacggtcgacaagtcccgctggcagcagggtaacgtgttttcgtgttcagtgatgcacgaggctctgcataatcactacacacagaagtccctctccttgagcaaaagctgcgacaagacagggggtggaggttcaggcggtggtgggtcgggagggggagggtcaggtggaggcggcagcgggggtgggggatcgggaggaggagggtccgggggagggggttccggagggggtgggtcctgtcccccttgtccagcgccggagctgttgggcggaccttcggtattcttgtttcctcctaagcccaaagatacgcttatgatctcccgcaccccggaggtaacttgcgtcgtagtggatgtatcacatgaggacccagaagtcaagttcaattggtacgtggacggagtcgaagtccataacgctaaaacgaaaccgagagaggaacagtatcagagcacctaccgggtagtgagcgtgctcacagtgttgcatcaggattggctgaatgggaaggaatacaagtgcaaagtgtcgaataaggcattgccagcaccgattgagaaaacaatctcaaaagcgaagggacagccccgagagcctcaagtcactacactgccacccagccgcgaagagatgacaaagaatcaggtatccctcacgtgtcttgtgaaggggttctatccctccgatatcgcagtagagtgggaatcgaacgggcagccggagaacaattacaagactttcccgccagtgcttgattcggacggtagcttctttttgtattcgaagctcacggtagataagtcgaggtggcaacaaggaaatgtgttttcatgttcggtgatgcatgaagcgctccataaccactatacgcagaaatcgctttcgctctccggtgaatgc

SEQ ID NO: 193 - protein, 497 aa, Artificial Sequence
  Description of Artificial Sequence: Synthetic polypeptide
EPKSCDKTHTCPPCPAPELLGGPSVFLFPPKPKDTLMISRTPEVTCVVVDVSHEDPEVKFNWYVDGVEVHNAKTKPREEQYQSTYRVVSVLTVLHQDWLNGKEYKCKVSNKALPAPIEKTISKAKGQPREPQVYTLPPSREEMTKNQVHLTCLVKGFYPSDIAVEWESNGQPENNYKTTPPVLDSDGSFALYSKLTVDKSRWQQGNVFSCSVMHEALHNHYTQKSLSLSKSCDKTGGGGSGGGGSGGGGSGGGGSGGGGSGGGGSGGGGSGGGGSCPPCPAPELLGGPSVFLFPPKPKDTLMISRTPEVTCVVVDVSHEDPEVKFNWYVDGVEVHNAKTKPREEQYQSTYRVVSVLTVLHQDWLNGKEYKCKVSNKALPAPIEKTISKAKGQPREPQVTTLPPSREEMTKNQVSLTCLVKGFYPSDIAVEWESNGQPENNYKTFPPVLDSDGSFFLYSKLTVDKSRWQQGNVFSCSVMHEALHNHYTQKSLSLSGEC

SEQ ID NO: 194 - DNA, 1491 bp, Artificial Sequence
  Description of Artificial Sequence: Synthetic polynucleotide
gaaccgaaatcatgcgacaaaacgcacacttgtccgccgtgcccagcgcccgagttgcttggcggacccagcgtgtttttgtttcccccgaaaccgaaagatacattgatgattagcagaacgcccgaagtgacgtgtgtagtagtcgacgtgtcgcacgaagatccggaggtgaagttcaactggtatgtcgatggggtagaggtgcacaacgcgaaaaccaagcccagggaggagcagtaccagtcgacatatcgggtcgtgtcagtgctgacagtgctccatcaggactggttgaacgggaaggagtataagtgtaaagtcagcaacaaagccctccccgcacccatcgagaaaaccatttccaaggcaaagggacaaccgagggaaccacaagtctacactctcccaccctcccgcgaagaaatgacgaaaaaccaagtgtcactgacgtgtcttgtagatggtttctacccctcggacatcgcggtcgaatgggagtcgaatggacagccggagaacaattacgataccacacctcctgtcttggattcggacggctcattcttcctttacagcgatctcactgtcgacaagtcgcgctggcagcagggaaacgtcttttcctgttcggtaatgcacgaagctctgcacaatcactacacgcagaagtcgctttcactttccaaaagctgcgacaagacagggggtggaggttcaggcggtggtgggtcgggagggggagggtcaggtggaggcggcagcgggggtgggggatcgggaggaggagggtccgggggagggggttccggagggggtgggtcctgtcccccttgtccagcgccggagctgttgggcggaccttcggtattcttgtttcctcctaagcccaaagatacgcttatgatctcccgcaccccggaggtaacttgcgtcgtagtggatgtatcacatgaggacccagaagtcaagttcaattggtacgtggacggagtcgaagtccataacgctaaaacgaaaccgagagaggaacagtatcagagcacctaccgggtagtgagcgtgctcacagtgttgcatcaggattggctgaatgggaaggaatacaagtgcaaagtgtcgaataaggcattgccagcaccgattgagaaaacaatctcaaaagcgaagggacagccccgagagcctcaagtctatacactgccgccaagccggaagaagatgaccaaaaaccaggtgtccctcacgtgcctcgtgaaagggttttacccgtcagatatcgccgtagaatgggagagcaatgggcagcccgagaataactataagactacgccccctgtactcaaatcggacgggtcattctttctgtattcgaagctcacggtagataagtcgaggtggcaacaaggaaatgtgttttcatgttcggtgatgcatgaagcgctccataaccactatacgcagaaatcgctttcgctctccggtgaatgc

SEQ ID NO: 195 - protein, 497 aa, Artificial Sequence
  Description of Artificial Sequence: Synthetic polypeptide
EPKSCDKTHTCPPCPAPELLGGPSVFLFPPKPKDTLMISRTPEVTCVVVDVSHEDPEVKFNWYVDGVEVHNAKTKPREEQYQSTYRVVSVLTVLHQDWLNGKEYKCKVSNKALPAPIEKTISKAKGQPREPQVYTLPPSREEMTKNQVSLTCLVDGFYPSDIAVEWESNGQPENNYDTTPPVLDSDGSFFLYSDLTVDKSRWQQGNVFSCSVMHEALHNHYTQKSLSLSKSCDKTGGGGSGGGGSGGGGSGGGGSGGGGSGGGGSGGGGSGGGGSCPPCPAPELLGGPSVFLFPPKPKDTLMISRTPEVTCVVVDVSHEDPEVKFNWYVDGVEVHNAKTKPREEQYQSTYRVVSVLTVLHQDWLNGKEYKCKVSNKALPAPIEKTISKAKGQPREPQVYTLPPSRKKMTKNQVSLTCLVKGFYPSDIAVEWESNGQPENNYKTTPPVLKSDGSFFLYSKLTVDKSRWQQGNVFSCSVMHEALHNHYTQKSLSLSGEC

SEQ ID NO: 196 - DNA, 1372 bp, Artificial Sequence
  Description of Artificial Sequence: Synthetic polynucleotide
gaaccgaaatcatgcgacaagacccatacatgcccaagctgtcccgctccggagtttctcggtggaccgtcggtgtttctgttccctccgaagccaaaagataccttgatgatttcgcgaactcccgaagtcacgtgtgtcgtcgtggacgtaagccaggaggacccggaggtccagttcaattggtatgtagacggcgtagaggtacataatgcgaaaacgaagcccagagaggaacagttcaatagcaaataccgcgtagtatcggtgctgacagtgttgcaccaggactggctgaatggaaaagaatacaagtgtaaagtgtccaacaagggccttccatcgtcgattgaaaagacaatctccaaggcaaaggggcagcctagggagccccaagtctacaccctgcccccttcgcgggaggagatgacgaagaaccaggtatcactgtcatgcgcggtcaaaggattttacccgagcgacatcgccgtagaatgggagtccaacggacagccagaaaacaattacaagaccactcctccagtgctcgatagcgatggctccttctttcttgtcagcaaattgacagtcgataagtcaagatggcagcagggtaatgtgttctcatgtagcgtcatgcacgaagcactccacaatcattatacacagaagagcctctcgttgtcgcccggaaaaggcggaggtgggtcgggcggagggggaagcggtggaggagggtcaggaggtggaggttccgggggaggcggttcgggaggagggggttcgggtggtggaggatcgggtggcggaggaagctgcccttcatgtccagcccccgagttcctcggaggcccgtcggtctttctttttccccctaagcctaaagataccctgatgatcagccggacgcctgaggtgacttgtgtggtagtcgacgtgtcccaagaagatccggaagtccagtttaactggtatgtggatggagtggaggtccataatgccaagacaaagccaagggaggagcaattcaactcgaagtaccgcgtcgtgtccgtgctcacagtgcttcatcaagactggttgaacggaaaggagtacaaatgtaaggtatcaaacaagggtttgccctcgtccatcgagaaaaccatctcgaaagcgaaagggcaaccccgcgagccccaggtatatacgctcccgccttcaagagaagaaatgacgaaaaaccaagtgagcttgtggtgcctggtcaaggggttctatccctccgatatcgcggtagagtgggaaagcaatgggcagccggagaacaactataagacaacgcctcccgtgttggactcagatggatcgttcttcttgtactcaaagctta

SEQ ID NO: 197 - protein, 494 aa, Artificial Sequence
  Description of Artificial Sequence: Synthetic polypeptide
EPKSCDKTHTCPSCPAPEFLGGPSVFLFPPKPKDTLMISRTPEVTCVVVDVSQEDPEVQFNWYVDGVEVHNAKTKPREEQFNSKYRVVSVLTVLHQDWLNGKEYKCKVSNKGLPSSIEKTISKAKGQPREPQVYTLPPSREEMTKNQVSLSCAVKGFYPSDIAVEWESNGQPENNYKTTPPVLDSDGSFFLVSKLTVDKSRWQQGNVFSCSVMHEALHNHYTQKSLSLSPGKGGGGSGGGGSGGGGSGGGGSGGGGSGGGGSGGGGSGGGGSCPSCPAPEFLGGPSVFLFPPKPKDTLMISRTPEVTCVVVDVSQEDPEVQFNWYVDGVEVHNAKTKPREEQFNSKYRVVSVLTVLHQDWLNGKEYKCKVSNKGLPSSIEKTISKAKGQPREPQVYTLPPSREEMTKNQVSLWCLVKGFYPSDIAVEWESNGQPENNYKTTPPVLDSDGSFFLYSKLTVDKSRWQQGNVFSCSVMHEALHNHYTQKSLSLSPGK

SEQ ID NO: 198 - DNA, 1482 bp, Artificial Sequence
  Description of Artificial Sequence: Synthetic polynucleotide
gaaccgaaatcatgcgataagacacacacgtgcccctcgtgccccgcaccggagttccttgggggtccgtcggtctttttgtttccccctaaacccaaggacacgctcatgatctcccgcacaccggaagtcacgtgcgtagtcgtggatgtctcacaagaggacccggaagtgcaattcaactggtacgtcgacggcgtggaggtgcacaatgccaagacgaaaccaagagaggaacagttcaactcaaagtaccgggtagtatcggtgttgacggtgctccatcaggattggcttaacggtaaagagtacaagtgtaaagtcagcaataagggtctgcccagctccatcgaaaagactatctccaaggccaaggggcagcctcgcgaaccgcaagtgtgtacgttgcccccgtcccgggaggagatgacgaaaaatcaggtcagcctctcgtgtgcggtgaaggggttttacccatccgacattgcggtggaatgggagagcaacggacagcccgaaaacaattacaagactaccccgccagtactcgatagcgacgggtcgttctttcttgtgtcgaaactgacagtggacaagtcaagatggcagcaaggaaatgtgttctcgtgtagcgtgatgcacgaggcactccacaatcattacacacagaagagcttgtccctctcccctggtaaaggaggaggagggtcgggtgggggaggcagcgggggaggaggatcaggaggtgggggttcaggcggagggggttcgggtggtgggggatcgggaggtggaggttcgggaggagggggctcctgtccgagctgccccgctcccgagttcttgggaggtccctcagtgtttcttttcccgccgaagcctaaagatacactgatgatttcacgaacccccgaagtgacatgcgtagtagtagatgtgtcgcaagaagatccggaagtccagttcaattggtatgtggatggggtggaggtccataatgcgaaaacaaaaccgcgggaagagcaattcaattcaaagtatagggtcgtcagcgtgctcacagtgctgcaccaggactggcttaatgggaaagaatacaagtgcaaggtatccaacaaggggttgccctcgtcgatcgagaaaacgatttcaaaagccaagggacaaccgagggaaccacaagtatgcacgctgccgccgtgtagggaagaaatgacgaagaaccaagtgagcctctggtgcctggtgaagggcttttatccctccgacatcgcagtcgagtgggaatcgaatgggcagccggagaacaactataagactactcccccagtgttggattcggatggatcatttttcctctactcgaaacttacggtcgacaaatcacgctggcagcagggcaacgtgttttcctgctcggtaatgcatgaggcgcttcacaaccactatacccagaagtcactgtcgcttagcccagggaaa

SEQ ID NO: 199 - protein, 494 aa, Artificial Sequence
  Description of Artificial Sequence: Synthetic polypeptide
EPKSCDKTHTCPSCPAPEFLGGPSVFLFPPKPKDTLMISRTPEVTCVVVDVSQEDPEVQFNWYVDGVEVHNAKTKPREEQFNSKYRVVSVLTVLHQDWLNGKEYKCKVSNKGLPSSIEKTISKAKGQPREPQVCTLPPSREEMTKNQVSLSCAVKGFYPSDIAVEWESNGQPENNYKTTPPVLDSDGSFFLVSKLTVDKSRWQQGNVFSCSVMHEALHNHYTQKSLSLSPGKGGGGSGGGGSGGGGSGGGGSGGGGSGGGGSGGGGSGGGGSCPSCPAPEFLGGPSVFLFPPKPKDTLMISRTPEVTCVVVDVSQEDPEVQFNWYVDGVEVHNAKTKPREEQFNSKYRVVSVLTVLHQDWLNGKEYKCKVSNKGLPSSIEKTISKAKGQPREPQVYTLPPCREEMTKNQVSLWCLVKGFYPSDIAVEWESNGQPENNYKTTPPVLDSDGSFFLYSKLTVDKSRWQQGNVFSCSVMHEALHNHYTQKSLSLSPGK

SEQ ID NO: 200 - DNA, 1482 bp, Artificial Sequence
  Description of Artificial Sequence: Synthetic polynucleotide
gaaccgaaatcatgcgacaagacccatacgtgcccatcgtgccccgcaccggagttcctcggaggcccgtcagtattcctttttcctccgaagcccaaagatacattgatgatcagcaggacgcctgaagtgacatgtgtagtggtagacgtgtcgcaagaagatccagaggtacagtttaactggtatgtcgacggggtggaagtccataacgccaagactaaaccccgcgaagagcagttcaactcaaagtatagagtagtctccgtcctgacagtcctccatcaggactggctgaacgggaaagaatacaagtgcaaagtctcgaacaaagggcttccgtcatcgatcgagaaaacgatttcaaaagccaagggacagcctagggagccgcaagtgtatactctgcccccgtcgcgcgaggagatgacgaaaaatcaggtgtccctcacgtgcctcgtcaaaggattttacccgtcggatatcgccgtggagtgggaatcgaatgggcaaccagagaacaactacaagaccactcccccggtgctggactcggacggctcctttttcttgacatcaaagctcacagtcgataagagccgctggcaacaagggaatgtgttcagctgctcggtgatgcacgaagcgctgcacaaccactatacccagaaatcattgtccctcagccccggaaagggaggtggagggtccggtgggggtggatcaggagggggtgggagcggaggaggcggcagcggtggcggagggtcaggtggaggcggatcaggtgggggaggttcaggcggtgggggctcgtgccccagctgtcctgctcccgagtttctcgggggaccttcagtctttctcttccctccgaaacccaaggacacgctgatgatttcgcggacacccgaagtgacttgtgtcgtggtcgacgtaagccaggaggaccccgaggtgcaattcaactggtacgtcgacggagtcgaggtccacaatgcgaaaacaaaacccagagaagaacagttcaattcgaaatatcgagtggtatcagtcctgaccgtgcttcatcaggattggctcaatgggaaagagtacaaatgcaaggtatcaaacaagggactgccaagctcaatcgaaaagactatctcgaaagcaaagggtcagcctcgggagccccaagtgtacacgcttcccccatccagggaagaaatgacgaagaaccaggtgtcgctctactgtttggtgaaggggttttatccttcggacatcgcggtggaatgggagtcgaatggacagccggagaataactacaaaacgactccgcctgtcctcgacagcgatgggtccttcttcctttactcaaaattgacagtagataagtcgcgctggcagcagggaaatgtattctcctgttccgtcatgcatgaggcgcttcacaatcactacactcagaagtccttgtcgttgtcaccaggaaaa

SEQ ID NO: 201 - protein, 494 aa, Artificial Sequence
  Description of Artificial Sequence: Synthetic polypeptide
EPKSCDKTHTCPSCPAPEFLGGPSVFLFPPKPKDTLMISRTPEVTCVVVDVSQEDPEVQFNWYVDGVEVHNAKTKPREEQFNSKYRVVSVLTVLHQDWLNGKEYKCKVSNKGLPSSIEKTISKAKGQPREPQVYTLPPSREEMTKNQVSLTCLVKGFYPSDIAVEWESNGQPENNYKTTPPVLDSDGSFFLTSKLTVDKSRWQQGNVFSCSVMHEALHNHYTQKSLSLSPGKGGGGSGGGGSGGGGSGGGGSGGGGSGGGGSGGGGSGGGGSCPSCPAPEFLGGPSVFLFPPKPKDTLMISRTPEVTCVVVDVSQEDPEVQFNWYVDGVEVHNAKTKPREEQFNSKYRVVSVLTVLHQDWLNGKEYKCKVSNKGLPSSIEKTISKAKGQPREPQVYTLPPSREEMTKNQVSLYCLVKGFYPSDIAVEWESNGQPENNYKTTPPVLDSDGSFFLYSKLTVDKSRWQQGNVFSCSVMHEALHNHYTQKSLSLSPGK

SEQ ID NO: 202 - DNA, 1482 bp, Artificial Sequence
  Description of Artificial Sequence: Synthetic polynucleotide
gaaccgaaatcatgcgacaagacatgctgttgcccaagctgtcccgctccggagtttctcggtggaccgtcggtgtttctgttccctccgaagccaaaagataccttgatgatttcgcgaactcccgaagtcacgtgtgtcgtcgtggacgtaagccaggaggacccggaggtccagttcaattggtatgtagacggcgtagaggtacataatgcgaaaacgaagcccagagaggaacagttcaatagcaaataccgcgtagtatcggtgctgacagtgttgcaccaggactggctgaatggaaaagaatacaagtgtaaagtgtccaacaagggccttccatcgtcgattgaaaagacaatctccaaggcaaaggggcagcctagggagccccaagtctacaccctgcccccttcgcgggaggagatgacgaagaaccaggtatcactgtcatgcgcggtcaaaggattttacccgagcgacatcgccgtagaatgggagtccaacggacagccagaaaacaattacaagaccactcctccagtgctcgatagcgatggctccttctttcttgtcagcaaattgacagtcgataagtcaagatggcagcagggtaatgtgttctcatgtagcgtcatgcacgaagcactccacaatcattatacacagaagagcctctcgttgtcgcccggaaaaggcggaggtgggtcgggcggagggggaagcggtggaggagggtcaggaggtggaggttccgggggaggcggttcgggaggagggggttcgggtggtggaggatcgggtggcggaggaagctgcccttcatgtccagcccccgagttcctcggaggcccgtcggtctttctttttccccctaagcctaaagataccctgatgatcagccggacgcctgaggtgacttgtgtggtagtcgacgtgtcccaagaagatccggaagtccagtttaactggtatgtggatggagtggaggtccataatgccaagacaaagccaagggaggagcaattcaactcgaagtaccgcgtcgtgtccgtgctcacagtgcttcatcaagactggttgaacggaaaggagtacaaatgtaaggtatcaaacaagggtttgccctcgtccatcgagaaaaccatctcgaaagcgaaagggcaaccccgcgagccccaggtatatacgctcccgccttcaagagaagaaatgactaaaaaccaagtgagcttgtggtgcctggtcaaggggttctatccctccgatatcgcggtagagtgggaaagcaatgggcagccggagaacaactataagacaacgcctcccgtgttggactcagatggatcgttcttcttgtactcaaagcttacggtggacaagtcacgctggcagcaagggaacgtgttttcgtgctcggtgatgcacgaggcgcttcacaatcactacactcagaaatcgcttagcttgtcaccaggaaaa

SEQ ID NO: 203 - protein, 494 aa, Artificial Sequence
  Description of Artificial Sequence: Synthetic polypeptide
EPKSCDKTCCCPSCPAPEFLGGPSVFLFPPKPKDTLMISRTPEVTCVVVDVSQEDPEVQFNWYVDGVEVHNAKTKPREEQFNSKYRVVSVLTVLHQDWLNGKEYKCKVSNKGLPSSIEKTISKAKGQPREPQVYTLPPSREEMTKNQVSLSCAVKGFYPSDIAVEWESNGQPENNYKTTPPVLDSDGSFFLVSKLTVDKSRWQQGNVFSCSVMHEALHNHYTQKSLSLSPGKGGGGSGGGGSGGGGSGGGGSGGGGSGGGGSGGGGSGGGGSCPSCPAPEFLGGPSVFLFPPKPKDTLMISRTPEVTCVVVDVSQEDPEVQFNWYVDGVEVHNAKTKPREEQFNSKYRVVSVLTVLHQDWLNGKEYKCKVSNKGLPSSIEKTISKAKGQPREPQVYTLPPSREEMTKNQVSLWCLVKGFYPSDIAVEWESNGQPENNYKTTPPVLDSDGSFFLYSKLTVDKSRWQQGNVFSCSVMHEALHNHYTQKSLSLSPGK

SEQ ID NO: 204 - DNA, 1482 bp, Artificial Sequence
  Description of Artificial Sequence: Synthetic polynucleotide
gaaccgaaatcatgcgacaagtgccatacatgcccaagctgtcccgctccggagtttctcggtggaccgtcggtgtttctgttccctccgaagccaaaagataccttgatgatttcgcgaactcccgaagtcacgtgtgtcgtcgtggacgtaagccaggaggacccggaggtccagttcaattggtatgtagacggcgtagaggtacataatgcgaaaacgaagcccagagaggaacagttcaatagcaaataccgcgtagtatcggtgctgacagtgttgcaccaggactggctgaatggaaaagaatacaagtgtaaagtgtccaacaagggccttccatcgtcgattgaaaagacaatctccaaggcaaaggggcagcctagggagccccaagtctacaccctgcccccttcgcgggaggagatgacgaagaaccaggtatcactgtcatgcgcggtcaaaggattttacccgagcgacatcgccgtagaatgggagtccaacggacagccagaaaacaattacaagaccactcctccagtgctcgatagcgatggctccttctttcttgtcagcaaattgacagtcgataagtcaagatggcagcagggtaatgtgttctcatgtagcgtcatgcacgaagcactccacaatcattatacacagaagagcctctcgttgtcgcccggaaaaggcggaggtgggtcgggcggagggggaagcggtggaggagggtcaggaggtggaggttccgggggaggcggttcgggaggagggggttcgggtggtggaggatcgggtggcggaggaagctgcccttcatgtccagcccccgagttcctcggaggcccgtcggtctttctttttccccctaagcctaaagataccctgatgatcagccggacgcctgaggtgacttgtgtggtagtcgacgtgtcccaagaagatccggaagtccagtttaactggtatgtggatggagtggaggtccataatgccaagacaaagccaagggaggagcaattcaactcgaagtaccgcgtcgtgtccgtgctcacagtgcttcatcaagactggttgaacggaaaggagtacaaatgtaaggtatcaaacaagggtttgccctcgtccatcgagaaaaccatctcgaaagcgaaagggcaaccccgcgagccccaggtatatacgctcccgccttcaagagaagaaatgacgaaaaaccaagtgagcttgtggtgcctggtcaaggggttctatccctccgatatcgcggtagagtgggaaagcaatgggcagccggagaacaactataagacaacgcctcccgtgttggactcagatggatcgttcttcttgtactcaaagcttacggtggacaagtcacgctggcagcaagggaacgtgttttcgtgctcggtgatgcacgaggcgcttcacaatcactacactcagaaatcgcttagcttgtcaccaggaaaa

SEQ ID NO: 205 - protein, 494 aa, Artificial Sequence
  Description of Artificial Sequence: Synthetic polypeptide
EPKSCDKCHTCPSCPAPEFLGGPSVFLFPPKPKDTLMISRTPEVTCVVVDVSQEDPEVQFNWYVDGVEVHNAKTKPREEQFNSKYRVVSVLTVLHQDWLNGKEYKCKVSNKGLPSSIEKTISKAKGQPREPQVYTLPPSREEMTKNQVSLSCAVKGFYPSDIAVEWESNGQPENNYKTTPPVLDSDGSFFLVSKLTVDKSRWQQGNVFSCSVMHEALHNHYTQKSLSLSPGKGGGGSGGGGSGGGGSGGGGSGGGGSGGGGSGGGGSGGGGSCPSCPAPEFLGGPSVFLFPPKPKDTLMISRTPEVTCVVVDVSQEDPEVQFNWYVDGVEVHNAKTKPREEQFNSKYRVVSVLTVLHQDWLNGKEYKCKVSNKGLPSSIEKTISKAKGQPREPQVYTLPPSREEMTKNQVSLWCLVKGFYPSDIAVEWESNGQPENNYKTTPPVLDSDGSFFLYSKLTVDKSRWQQGNVFSCSVMHEALHNHYTQKSLSLSPGK

SEQ ID NO: 206 - DNA, 1491 bp, Artificial Sequence
  Description of Artificial Sequence: Synthetic polynucleotide
gaaccgaaatcatgcgataaaacgcacacgtgcccctcgtgtccggcaccggagtttcttggaggtccctcggtgttcctgttccctcccaagccgaaggacacgttgatgatttcgaggacgccggaggtgacgtgtgtggtcgtagacgtgagccaggaggacccggaagtgcagtttaactggtacgtcgatggagtagaagtacataatgccaagacgaagcccagggaggaacaattcaattcgaagtatcgcgtcgtatccgtgctgactgtgctccaccaggactggcttaacggaaaagaatacaagtgcaaggtatcaaataagggactcccctcgtcgatcgagaaaacaatcagcaaagcgaaaggacagccgagggaaccgcaagtgtacacattgccgccgtcgcgagaagaaatgaccaagaaccaggtatcactctcgtgcgccgtgaagggcttttacccatcggacattgctgtggagtgggagagcaacggtcaacccgagaataactacaaaactacaccgcccgtgctggattccgacggctcattctttctcgtgtcaaaactgactgtggataagtcgcgctggcaacaggggaatgtgttctcgtgcagcgtcatgcatgaagctcttcataatcactacacccaaaaatccctgtcactctcgaaaagctgtgataagaccgggggtgggggctccggaggaggcggttcgggtggcggtgggtcgggtggaggcggatcgggcggtgggggaagcggtggtggtggaagcggagggggtggatcaggtggagggggcagctgtccatcctgccctgcaccagagtttttgggaggaccgtccgtatttctgtttccgcccaagcccaaagatactttgatgatcagcaggacgcctgaggtaacatgtgtagtggtcgatgtctcgcaagaggaccctgaggtccagttcaattggtacgtggacggggtggaagtccacaacgcgaaaacgaaaccacgcgaagaacagttcaacagcaaatacagagtcgtgtcagtcttgacagtccttcaccaggattggttgaatggaaaggagtacaagtgtaaggtgtcaaacaaaggactgcccagctcgatcgaaaagacaatttcgaaggcaaaaggtcaaccgcgggagccacaagtgtatacgctgccgccctcgcgggaggagatgacaaagaatcaggtgtcgctgtggtgtctggtaaaaggattctatccatccgatatcgcggtagagtgggaatcaaacggccagccggagaacaattacaagaccacgccccctgtattggattcggacggatcgttcttcttgtattcgaaactcacggtggacaagtcgcggtggcagcagggtaatgtgttttcatgctcagtcatgcacgaggcgctccataaccattatactcagaagtcgctgtccttgtccggggagtgc

SEQ ID NO: 207 - protein, 497 aa, Artificial Sequence
  Description of Artificial Sequence: Synthetic polypeptide
EPKSCDKTHTCPSCPAPEFLGGPSVFLFPPKPKDTLMISRTPEVTCVVVDVSQEDPEVQFNWYVDGVEVHNAKTKPREEQFNSKYRVVSVLTVLHQDWLNGKEYKCKVSNKGLPSSIEKTISKAKGQPREPQVYTLPPSREEMTKNQVSLSCAVKGFYPSDIAVEWESNGQPENNYKTTPPVLDSDGSFFLVSKLTVDKSRWQQGNVFSCSVMHEALHNHYTQKSLSLSKSCDKTGGGGSGGGGSGGGGSGGGGSGGGGSGGGGSGGGGSGGGGSCPSCPAPEFLGGPSVFLFPPKPKDTLMISRTPEVTCVVVDVSQEDPEVQFNWYVDGVEVHNAKTKPREEQFNSKYRVVSVLTVLHQDWLNGKEYKCKVSNKGLPSSIEKTISKAKGQPREPQVYTLPPSREEMTKNQVSLWCLVKGFYPSDIAVEWESNGQPENNYKTTPPVLDSDGSFFLYSKLTVDKSRWQQGNVFSCSVMHEALHNHYTQKSLSLSGEC

SEQ ID NO: 208 - DNA, 1422 bp, Artificial Sequence
  Description of Artificial Sequence: Synthetic polynucleotide
gaaccgaaatcatgcgacaagacccatacatgcccaagctgtcccgctccggagtttctcggtggaccgtcggtgtttctgttccctccgaagccaaaagataccttgatgatttcgcgaactcccgaagtcacgtgtgtcgtcgtggacgtaagccaggaggacccggaggtccagttcaattggtatgtagacggcgtagaggtacataatgcgaaaacgaagcccagagaggaacagttcaatagcaaataccgcgtagtatcggtgctgacagtgttgcaccaggactggctgaatggaaaagaatacaagtgtaaagtgtccaacaagggccttccatcgtcgattgaaaagacaatctccaaggcaaaggggcagcctagggagccccaagtctacaccctgcccccttcgcgggaggagatgacgaagaaccaggtatcactgtcatgcgcggtcaaaggattttacccgagcgacatcgccgtagaatgggagtccaacggacagccagaaaacaattacaagaccactcctccagtgctcgatagcgatggctccttctttcttgtcagcaaattgacagtcgataagtcaagatggcagcagggtaatgtgttctcatgtagcgtcatgcacgaagcactccacaatcattatacacagaagagcctctcgttgtcgcccggaaaaggcggaggtgggtcgggcggagggggaagcggtggaggagggtcaggaggtggaggttcctgcccttcatgtccagcccccgagttcctcggaggcccgtcggtctttctttttccccctaagcctaaagataccctgatgatcagccggacgcctgaggtgacttgtgtggtagtcgacgtgtcccaagaagatccggaagtccagtttaactggtatgtggatggagtggaggtccataatgccaagacaaagccaagggaggagcaattcaactcgaagtaccgcgtcgtgtccgtgctcacagtgcttcatcaagactggttgaacggaaaggagtacaaatgtaaggtatcaaacaagggtttgccctcgtccatcgagaaaaccatctcgaaagcgaaagggcaaccccgcgagccccaggtatatacgctcccgccttcaagagaagaaatgacgaaaaaccaagtgagcttgtggtgcctggtcaaggggttctatccctccgatatcgcggtagagtgggaaagcaatgggcagccggagaacaactataagacaacgcctcccgtgttggactcagatggatcgttcttcttgtactcaaagcttacggtggacaagtcacgctggcagcaagggaacgtgttttcgtgctcggtgatgcacgaggcgcttcacaatcactacactcagaaatcgcttagcttgtcaccaggaaaa

SEQ ID NO: 209 - protein, 474 aa, Artificial Sequence
  Description of Artificial Sequence: Synthetic polypeptide
EPKSCDKTHTCPSCPAPEFLGGPSVFLFPPKPKDTLMISRTPEVTCVVVDVSQEDPEVQFNWYVDGVEVHNAKTKPREEQFNSKYRVVSVLTVLHQDWLNGKEYKCKVSNKGLPSSIEKTISKAKGQPREPQVYTLPPSREEMTKNQVSLSCAVKGFYPSDIAVEWESNGQPENNYKTTPPVLDSDGSFFLVSKLTVDKSRWQQGNVFSCSVMHEALHNHYTQKSLSLSPGKGGGGSGGGGSGGGGSGGGGSCPSCPAPEFLGGPSVFLFPPKPKDTLMISRTPEVTCVVVDVSQEDPEVQFNWYVDGVEVHNAKTKPREEQFNSKYRVVSVLTVLHQDWLNGKEYKCKVSNKGLPSSIEKTISKAKGQPREPQVYTLPPSREEMTKNQVSLWCLVKGFYPSDIAVEWESNGQPENNYKTTPPVLDSDGSFFLYSKLTVDKSRWQQGNVFSCSVMHEALHNHYTQKSLSLSPGK

SEQ ID NO: 210 - DNA, 1476 bp, Artificial Sequence
  Description of Artificial Sequence: Synthetic polynucleotide
gaaccgaaatcatgcgacaaaacgcacacctgtccgtcatgtcctgccccggaattccttggagggccttccgtgtttctcttccctccgaagcccaaggacacgctgatgatctcccggaccccggaggtcacgtgtgtggtagtagacgtgtcacaagaagatccggaggtgcagttcaactggtacgtagatggcgtggaggtgcacaacgccaaaacgaagccccgagaggaacagttcaattcgaagtaccgcgtcgtgtcggtattgactgtattgcatcaagactggttgaacgggaaggagtataagtgtaaagtcagcaacaagggacttccctcgtcaattgaaaagacaatttcgaaagccaaaggccagcccagggagccccaagtgtacaccctgccacccagccgggaagagatgacaaagaatcaagtctcgcttagctgcgctgtcaagggcttctatccatcggacattgcagtggaatgggaatcaaacggacagccggagaataactataagacgacaccccctgtcctcgacagcgacgggtcgttcttccttgtgagcaagctcacggtcgacaaaagccgctggcagcagggaaacgtattctcatgttcggtgatgcacgaagcattgcataaccactacacgcagaagagcttgtcgttgtcgaaaagctgcgacaagacgggagggggagggtccgggggtggtgggagcggcggaggaggtagcggcggaggtggctcgggaggaggtgggtcgggtggtgggggaagcggaggcggagggtcatgtccgagctgcccggcacccgaatttctcggaggtccctcggtgttcctgttcccgccaaagcctaaggatacgttgatgatttcgcgcacgccggaggtaacatgcgtggtggtggatgtgtcacaagaggaccccgaggtccagttcaattggtacgtcgatggagtggaagtgcacaatgcgaaaacaaaaccccgggaggagcagttcaatagcaagtacagggtagtctccgtcctgactgtacttcaccaagactggcttaacggaaaagagtataagtgcaaggtcagcaacaaggggcttccttcatccatcgagaaaaccatctcgaaggccaagggacagccgagggagcctcaagtatacacgctgccgccatcgagagaagaaatgaccaaaaaccaggtgtccctttggtgtttggtgaagggtttctatccctccgatatcgccgtagagtgggagtcaaatggacagcctgagaacaactataagactacgccccctgtgttggacagcgatgggtcattctttctgtattcgaaactcacggtggataagtcgcgatggcaacagggcaatgtgttttcgtgcagcgtgatgcatgaggcgctgcacaaccactatactcagaaatcgttaagcttatcgggagagtgt

SEQ ID NO: 211 - protein, 492 aa, Artificial Sequence
  Description of Artificial Sequence: Synthetic polypeptide
EPKSCDKTHTCPSCPAPEFLGGPSVFLFPPKPKDTLMISRTPEVTCVVVDVSQEDPEVQFNWYVDGVEVHNAKTKPREEQFNSKYRVVSVLTVLHQDWLNGKEYKCKVSNKGLPSSIEKTISKAKGQPREPQVYTLPPSREEMTKNQVSLSCAVKGFYPSDIAVEWESNGQPENNYKTTPPVLDSDGSFFLVSKLTVDKSRWQQGNVFSCSVMHEALHNHYTQKSLSLSKSCDKTGGGGSGGGGSGGGGSGGGGSGGGGSGGGGSGGGGSCPSCPAPEFLGGPSVFLFPPKPKDTLMISRTPEVTCVVVDVSQEDPEVQFNWYVDGVEVHNAKTKPREEQFNSKYRVVSVLTVLHQDWLNGKEYKCKVSNKGLPSSIEKTISKAKGQPREPQVYTLPPSREEMTKNQVSLWCLVKGFYPSDIAVEWESNGQPENNYKTTPPVLDSDGSFFLYSKLTVDKSRWQQGNVFSCSVMHEALHNHYTQKSLSLSGEC

SEQ ID NO: 212 - DNA, 1476 bp, Artificial Sequence
  Description of Artificial Sequence: Synthetic polynucleotide
gaaccgaaatcatgcgacaaaacgcacacctgtccgtcatgtcctgccccggaattccttggagggccttccgtgtttctcttccctccgaagcccaaggacacgctgatgatctcccggaccccggaggtcacgtgtgtggtagtagacgtgtcacaagaagatccggaggtgcagttcaactggtacgtagatggcgtggaggtgcacaacgccaaaacgaagccccgagaggaacagttcaattcgaagtaccgcgtcgtgtcggtattgactgtattgcatcaagactggttgaacgggaaggagtataagtgtaaagtcagcaacaagggacttccctcgtcaattgaaaagacaatttcgaaagccaaaggccagcccagggagccccaagtgtacaccctgccacccagccgggaagagatgacaaagaatcaagtctcgcttagctgcgctgtcaagggcttctatccatcggacattgcagtggaatgggaatcaaacggacagccggagaataactataagacgacaccccctgtcctcgacagcgacgggtcgttcttccttgtgagcaagctcacggtcgacaaaagccgctggcagcagggaaacgtattctcatgttcggtgatgcacgaagcattgcataaccactacacgcagaagagcttgtcgttgtcgggggaatgcggagggggagggtccggagggggagggtccgggggtggtgggagcggcggaggaggtagcggcggaggtggctcgggaggaggtgggtcgggtggtgggggatcatgtccgagctgcccggcacccgaatttctcggaggtccctcggtgttcctgttcccgccaaagcctaaggatacgttgatgatttcgcgcacgccggaggtaacatgcgtggtggtggatgtgtcacaagaggaccccgaggtccagttcaattggtacgtcgatggagtggaagtgcacaatgcgaaaacaaaaccccgggaggagcagttcaatagcaagtacagggtagtctccgtcctgactgtacttcaccaagactggcttaacggaaaagagtataagtgcaaggtcagcaacaaggggcttccttcatccatcgagaaaaccatctcgaaggccaagggacagccgagggagcctcaagtatacacgctgccgccatcgagagaagaaatgaccaaaaaccaggtgtccctttggtgtttggtgaagggtttctatccctccgatatcgccgtagagtgggagtcaaatggacagcctgagaacaactataagactacgccccctgtgttggacagcgatgggtcattctttctgtattcgaaactcacggtggataagtcgcgatggcaacagggcaatgtgttttcgtgcagcgtgatgcatgaggcgctgcacaaccactatactcagaaatcgttaagcttatcgaagtcatgcgacaagact

SEQ ID NO: 213 - protein, 492 aa, Artificial Sequence
  Description of Artificial Sequence: Synthetic polypeptide
EPKSCDKTHTCPSCPAPEFLGGPSVFLFPPKPKDTLMISRTPEVTCVVVDVSQEDPEVQFNWYVDGVEVHNAKTKPREEQFNSKYRVVSVLTVLHQDWLNGKEYKCKVSNKGLPSSIEKTISKAKGQPREPQVYTLPPSREEMTKNQVSLSCAVKGFYPSDIAVEWESNGQPENNYKTTPPVLDSDGSFFLVSKLTVDKSRWQQGNVFSCSVMHEALHNHYTQKSLSLSGECGGGGSGGGGSGGGGSGGGGSGGGGSGGGGSGGGGSCPSCPAPEFLGGPSVFLFPPKPKDTLMISRTPEVTCVVVDVSQEDPEVQFNWYVDGVEVHNAKTKPREEQFNSKYRVVSVLTVLHQDWLNGKEYKCKVSNKGLPSSIEKTISKAKGQPREPQVYTLPPSREEMTKNQVSLWCLVKGFYPSDIAVEWESNGQPENNYKTTPPVLDSDGSFFLYSKLTVDKSRWQQGNVFSCSVMHEALHNHYTQKSLSLSKSCDKT

SEQ ID NO: 214 - DNA, 1461 bp, Artificial Sequence
  Description of Artificial Sequence: Synthetic polynucleotide
gaaccgaaatcatgcgacaaaacgcacacctgtccgtcatgtcctgccccggaattccttggagggccttccgtgtttctcttccctccgaagcccaaggacacgctgatgatctcccggaccccggaggtcacgtgtgtggtagtagacgtgtcacaagaagatccggaggtgcagttcaactggtacgtagatggcgtggaggtgcacaacgccaaaacgaagccccgagaggaacagttcaattcgaagtaccgcgtcgtgtcggtattgactgtattgcatcaagactggttgaacgggaaggagtataagtgtaaagtcagcaacaagggacttccctcgtcaattgaaaagacaatttcgaaagccaaaggccagcccagggagccccaagtgtacaccctgccacccagccgggaagagatgacaaagaatcaagtctcgcttagctgcgctgtcaagggcttctatccatcggacattgcagtggaatgggaatcaaacggacagccggagaataactataagacgacaccccctgtcctcgacagcgacgggtcgttcttccttgtgagcaagctcacggtcgacaaaagccgctggcagcagggaaacgtattctcatgttcggtgatgcacgaagcattgcataaccactacacgcagaagagcttgtcgttgtcgaaaagctgcgacaagacgggagggggagggtccgggggtggtgggagcggcggaggaggtagcggcggaggtggctcgggaggaggtgggtcgggtggtgggggatcatgtccgagctgcccggcacccgaatttctcggaggtccctcggtgttcctgttcccgccaaagcctaaggatacgttgatgatttcgcgcacgccggaggtaacatgcgtggtggtggatgtgtcacaagaggaccccgaggtccagttcaattggtacgtcgatggagtggaagtgcacaatgcgaaaacaaaaccccgggaggagcagttcaatagcaagtacagggtagtctccgtcctgactgtacttcaccaagactggcttaacggaaaagagtataagtgcaaggtcagcaacaaggggcttccttcatccatcgagaaaaccatctcgaaggccaagggacagccgagggagcctcaagtatacacgctgccgccatcgagagaagaaatgaccaaaaaccaggtgtccctttggtgtttggtgaagggtttctatccctccgatatcgccgtagagtgggagtcaaatggacagcctgagaacaactataagactacgccccctgtgttggacagcgatgggtcattctttctgtattcgaaactcacggtggataagtcgcgatggcaacagggcaatgtgttttcgtgcagcgtgatgcatgaggcgctgcacaaccactatactcagaaatcgttaagcttatcgggagagtgt

SEQ ID NO: 215 - protein, 487 aa, Artificial Sequence
  Description of Artificial Sequence: Synthetic polypeptide
EPKSCDKTHTCPSCPAPEFLGGPSVFLFPPKPKDTLMISRTPEVTCVVVDVSQEDPEVQFNWYVDGVEVHNAKTKPREEQFNSKYRVVSVLTVLHQDWLNGKEYKCKVSNKGLPSSIEKTISKAKGQPREPQVYTLPPSREEMTKNQVSLSCAVKGFYPSDIAVEWESNGQPENNYKTTPPVLDSDGSFFLVSKLTVDKSRWQQGNVFSCSVMHEALHNHYTQKSLSLSKSCDKTGGGGSGGGGSGGGGSGGGGSGGGGSGGGGSCPSCPAPEFLGGPSVFLFPPKPKDTLMISRTPEVTCVVVDVSQEDPEVQFNWYVDGVEVHNAKTKPREEQFNSKYRVVSVLTVLHQDWLNGKEYKCKVSNKGLPSSIEKTISKAKGQPREPQVYTLPPSREEMTKNQVSLWCLVKGFYPSDIAVEWESNGQPENNYKTTPPVLDSDGSFFLYSKLTVDKSRWQQGNVFSCSVMHEALHNHYTQKSLSLSGEC

SEQ ID NO: 216 - DNA, 1446 bp, Artificial Sequence
  Description of Artificial Sequence: Synthetic polynucleotide
gaaccgaaatcatgcgacaaaacgcacacctgtccgtcatgtcctgccccggaattccttggagggccttccgtgtttctcttccctccgaagcccaaggacacgctgatgatctcccggaccccggaggtcacgtgtgtggtagtagacgtgtcacaagaagatccggaggtgcagttcaactggtacgtagatggcgtggaggtgcacaacgccaaaacgaagccccgagaggaacagttcaattcgaagtaccgcgtcgtgtcggtattgactgtattgcatcaagactggttgaacgggaaggagtataagtgtaaagtcagcaacaagggacttccctcgtcaattgaaaagacaatttcgaaagccaaaggccagcccagggagccccaagtgtacaccctgccacccagccgggaagagatgacaaagaatcaagtctcgcttagctgcgctgtcaagggcttctatccatcggacattgcagtggaatgggaatcaaacggacagccggagaataactataagacgacaccccctgtcctcgacagcgacgggtcgttcttccttgtgagcaagctcacggtcgacaaaagccgctggcagcagggaaacgtattctcatgttcggtgatgcacgaagcattgcataaccactacacgcagaagagcttgtcgttgtcgaaaagctgcgacaagacgggagggggagggtccgggggtggtgggagcggcggaggaggtagcggcggaggtggctcgggaggaggtgggtcatgtccgagctgcccggcacccgaatttctcggaggtccctcggtgttcctgttcccgccaaagcctaaggatacgttgatgatttcgcgcacgccggaggtaacatgcgtggtggtggatgtgtcacaagaggaccccgaggtccagttcaattggtacgtcgatggagtggaagtgcacaatgcgaaaacaaaaccccgggaggagcagttcaatagcaagtacagggtagtctccgtcctgactgtacttcaccaagactggcttaacggaaaagagtataagtgcaaggtcagcaacaaggggcttccttcatccatcgagaaaaccatctcgaaggccaagggacagccgagggagcctcaagtatacacgctgccgccatcgagagaagaaatgaccaaaaaccaggtgtccctttggtgtttggtgaagggtttctatccctccgatatcgccgtagagtgggagtcaaatggacagcctgagaacaactataagactacgccccctgtgttggacagcgatgggtcattctttctgtattcgaaactcacggtggataagtcgcgatggcaacagggcaatgtgttttcgtgcagcgtgatgcatgaggcgctgcacaaccactatactcagaaatcgttaagcttatcgggagagtgt

SEQ ID NO: 217 - protein, 482 aa, Artificial Sequence
  Description of Artificial Sequence: Synthetic polypeptide
EPKSCDKTHTCPSCPAPEFLGGPSVFLFPPKPKDTLMISRTPEVTCVVVDVSQEDPEVQFNWYVDGVEVHNAKTKPREEQFNSKYRVVSVLTVLHQDWLNGKEYKCKVSNKGLPSSIEKTISKAKGQPREPQVYTLPPSREEMTKNQVSLSCAVKGFYPSDIAVEWESNGQPENNYKTTPPVLDSDGSFFLVSKLTVDKSRWQQGNVFSCSVMHEALHNHYTQKSLSLSKSCDKTGGGGSGGGGSGGGGSGGGGSGGGGSCPSCPAPEFLGGPSVFLFPPKPKDTLMISRTPEVTCVVVDVSQEDPEVQFNWYVDGVEVHNAKTKPREEQFNSKYRVVSVLTVLHQDWLNGKEYKCKVSNKGLPSSIEKTISKAKGQPREPQVYTLPPSREEMTKNQVSLWCLVKGFYPSDIAVEWESNGQPENNYKTTPPVLDSDGSFFLYSKLTVDKSRWQQGNVFSCSVMHEALHNHYTQKSLSLSGEC

SEQ ID NO: 218 - DNA, 1491 bp, Artificial Sequence
  Description of Artificial Sequence: Synthetic polynucleotide
gaaccgaaatcatgcgacaaaacgcacacttgtccttcctgccctgccccggagttccttggcggaccctcggtctttttgtttccgccgaaaccgaaagacacccttatgattagcaggacacccgaagtcacgtgtgtcgtcgtggacgtgtcgcaagaggatcccgaggtgcagttcaactggtacgtggacggggtagaagtccacaatgccaagacaaaaccccgggaagaacagtttaactcgaagtaccgcgtagtgtcagtcttgacagtcctccatcaggactggcttaacgggaaggagtacaaatgtaaagtgtcaaacaagggtctgccttccagcattgagaaaacgatctccaaggctaaagggcagccccgagaaccacaagtctatacgcttccaccatcgcgggaggagatgaccaagaaccaggtccacttgacctgtctcgtgaaggggttctacccgtcagatatcgcggtagagtgggaatcgaacggccagcccgagaataactacaagacgactcctccggtcctcgattcagatgggtcgttcgcactctactcaaaacttacggtggacaagtcgagatggcagcagggcaacgtgtttagctgctcagtcatgcacgaggcgctgcataatcactatacacagaagtcgctgtcattgtcaaaaagctgcgacaagacagggggtggaggttcaggcggtggtgggtcgggagggggagggtcaggtggaggcggcagcgggggtgggggatcgggaggaggagggtccgggggagggggttccggagggggtgggtcctgtccgtcgtgccctgcaccggaattcttgggcggtccgtcagtgttcctgtttcccccgaaacccaaagatacgctcatgatttcccgcacccctgaggtcacttgcgtggtagtcgatgtcagccaggaagatcccgaagtacagttcaattggtacgtagatggtgtagaagtacacaacgctaaaactaagcctcgcgaagagcagttcaattcgaagtatcgggtagtaagcgtgctgactgtgctccatcaagactggctgaatggaaaagagtataagtgcaaagtctcgaataagggattgcccagctccatcgagaaaaccatctcgaaagcgaagggacagcccagagaaccccaagtgaccacattgccaccctcccgagaggaaatgactaagaatcaagtgtcactcacatgtcttgtgaagggattctatcccagcgacatcgccgtcgagtgggagtccaatgggcagccggaaaacaattacaaaacgtttccacccgtccttgactcagatggatcgttctttctctattcgaagctcacggtagataagtcgaggtggcaacaaggaaatgtgttttcatgttcggtgatgcatgaagcgctccataaccactatacgcagaaatcgctttcgctctccggtgaatgc

SEQ ID NO: 219 - protein, 497 aa, Artificial Sequence
  Description of Artificial Sequence: Synthetic polypeptide
EPKSCDKTHTCPSCPAPEFLGGPSVFLFPPKPKDTLMISRTPEVTCVVVDVSQEDPEVQFNWYVDGVEVHNAKTKPREEQFNSKYRVVSVLTVLHQDWLNGKEYKCKVSNKGLPSSIEKTISKAKGQPREPQVYTLPPSREEMTKNQVHLTCLVKGFYPSDIAVEWESNGQPENNYKTTPPVLDSDGSFALYSKLTVDKSRWQQGNVFSCSVMHEALHNHYTQKSLSLSKSCDKTGGGGSGGGGSGGGGSGGGGSGGGGSGGGGSGGGGSGGGGSCPSCPAPEFLGGPSVFLFPPKPKDTLMISRTPEVTCVVVDVSQEDPEVQFNWYVDGVEVHNAKTKPREEQFNSKYRVVSVLTVLHQDWLNGKEYKCKVSNKGLPSSIEKTISKAKGQPREPQVTTLPPSREEMTKNQVSLTCLVKGFYPSDIAVEWESNGQPENNYKTFPPVLDSDGSFFLYSKLTVDKSRWQQGNVFSCSVMHEALHNHYTQKSLSLSGEC

SEQ ID NO: 220 - DNA, 1491 bp, Artificial Sequence
  Description of Artificial Sequence: Synthetic polynucleotide
gaaccgaaatcatgcgacaaaacgcacacttgtccttcctgccctgccccggagttccttggcggaccctcggtctttttgtttccgccgaaaccgaaagacacccttatgattagcaggacacccgaagtcacgtgtgtcgtcgtggacgtgtcgcaagaggatcccgaggtgcagttcaactggtacgtggacggggtagaagtccacaatgccaagacaaaaccccgggaagaacagtttaactcgaagtaccgcgtagtgtcagtcttgacagtcctccatcaggactggcttaacgggaaggagtacaaatgtaaagtgtcaaacaagggtctgccttccagcattgagaaaacgatctccaaggctaaaggacagccaagagagcctcaagtctatacattgcccccgagccgggaggaaatgaccaaaaaccaggtatcgcttacgtgcttggtggacgggttttacccttcagacatcgcagtggagtgggaatccaacgggcagccagagaacaattacgataccactccacccgtgcttgacagcgatggctcattcttcctctattccgacttgaccgtcgataagtcacgatggcagcaggggaatgtgtttagctgttcggtcatgcacgaagcgctgcacaaccactacacgcagaagtcgctctcattgtccaaaagctgcgacaagacagggggtggaggttcaggcggtggtgggtcgggagggggagggtcaggtggaggcggcagcgggggtgggggatcgggaggaggagggtccgggggagggggttccggagggggtgggtcctgtccgtcgtgccctgcaccggaattcttgggcggtccgtcagtgttcctgtttcccccgaaacccaaagatacgctcatgatttcccgcacccctgaggtcacttgcgtggtagtcgatgtcagccaggaagatcccgaagtacagttcaattggtacgtagatggtgtagaagtacacaacgctaaaactaagcctcgcgaagagcagttcaattcgaagtatcgggtagtaagcgtgctgactgtgctccatcaagactggctgaatggaaaagagtataagtgcaaagtctcgaataagggattgcccagctccatcgagaaaaccatctcgaaagcgaagggacagcccagagaaccccaagtgtatacgcttcccccttcaagaaagaagatgactaagaatcaggtgtcactcacgtgcctcgtgaagggattctatccgtcggacatcgcggtcgaatgggagtcgaatggacagccggagaacaactacaagacaacacctccagtgctgaaatcggatgggagcttctttctgtattcgaagctcacggtagataagtcgaggtggcaacaaggaaatgtgttttcatgttcggtgatgcatgaagcgctccataaccactatacgcagaaatcgctttcgctctccggtgaatgc

SEQ ID NO: 221 - protein, 497 aa, Artificial Sequence
  Description of Artificial Sequence: Synthetic polypeptide
EPKSCDKTHTCPSCPAPEFLGGPSVFLFPPKPKDTLMISRTPEVTCVVVDVSQEDPEVQFNWYVDGVEVHNAKTKPREEQFNSKYRVVSVLTVLHQDWLNGKEYKCKVSNKGLPSSIEKTISKAKGQPREPQVYTLPPSREEMTKNQVSLTCLVDGFYPSDIAVEWESNGQPENNYDTTPPVLDSDGSFFLYSDLTVDKSRWQQGNVFSCSVMHEALHNHYTQKSLSLSKSCDKTGGGGSGGGGSGGGGSGGGGSGGGGSGGGGSGGGGSGGGGSCPSCPAPEFLGGPSVFLFPPKPKDTLMISRTPEVTCVVVDVSQEDPEVQFNWYVDGVEVHNAKTKPREEQFNSKYRVVSVLTVLHQDWLNGKEYKCKVSNKGLPSSIEKTISKAKGQPREPQVYTLPPSRKKMTKNQVSLTCLVKGFYPSDIAVEWESNGQPENNYKTTPPVLKSDGSFFLYSKLTVDKSRWQQGNVFSCSVMHEALHNHYTQKSLSLSGEC

SEQ ID NO: 222 - DNA, 651 bp, Artificial Sequence
  Description of Artificial Sequence: Synthetic polynucleotide
gaggtgcaactggtagaaagcggaggtggtcttgtacagcccggtggttcactcagactgtcgtgcgcagcttcagggtatacgttcacctcctactggctccattgggtgcgacaggctccggggaaaggactggaatgggtcgggatgattgatccgtcgaattcggatactaggttcaatcccaacttcaaggaccggtttaccattagcgcggatacctcgaaaaacaccgcatatctccaaatgaactcgttgagagccgaggacacggcggtgtattactgcgcaagatacgggtcgtatgtgtcaccgttggactactggggccaggggacactggtaacggtcagctcagctagcacgaagggacctagcgtgttcccattggcgcccagctcgaaatccacatcgggcggaacggcagcccttgggtgcctcgtgaaagactactttcccgaaccggtgactgtgtcgtggaattcaggggcattgacttccggtgtccacacatttccagccgtgctgcagtccagcgggttgtattcgctctcgtcagtggtcacagtcccatcctcctcgctcggaacacaaacctatatctgtaatgtcaaccataaaccttcaaatacaaaagtggacaaaaaggta

SEQ ID NO: 223 - protein, 217 aa, Artificial Sequence
  Description of Artificial Sequence: Synthetic polypeptide
EVQLVESGGGLVQPGGSLRLSCAASGYTFTSYWLHWVRQAPGKGLEWVGMIDPSNSDTRFNPNFKDRFTISADTSKNTAYLQMNSLRAEDTAVYYCARYGSYVSPLDYWGQGTLVTVSSASTKGPSVFPLAPSSKSTSGGTAALGCLVKDYFPEPVTVSWNSGALTSGVHTFPAVLQSSGLYSLSSVVTVPSSSLGTQTYICNVNHKPSNTKVDKKV

SEQ ID NO: 224 - DNA, 2913 bp, Artificial Sequence
  Description of Artificial Sequence: Synthetic polynucleotide
gaggtgcaactggtagaaagcggaggtggtcttgtacagcccggtggttcactcagactgtcgtgcgcagcttcagggtatacgttcacctcctactggctccattgggtgcgacaggctccggggaaaggactggaatgggtcgggatgattgatccgtcgaattcggatactaggttcaatcccaacttcaaggaccggtttaccattagcgcggatacctcgaaaaacaccgcatatctccaaatgaactcgttgagagccgaggacacggcggtgtattactgcgcaagatacgggtcgtatgtgtcaccgttggactactggggccaggggacactggtaacggtcagctcagctagcacgaagggacctagcgtgttcccattggcgcccagctcgaaatccacatcgggcggaacggcagcccttgggtgcctcgtgaaagactactttcccgaaccggtgactgtgtcgtggaattcaggggcattgacttccggtgtccacacatttccagccgtgctgcagtccagcgggttgtattcgctctcgtcagtggtcacagtcccatcctcctcgctcggaacacaaacctatatctgtaatgtcaaccataaaccttcaaatacaaaagtggacaaaaaggtagaaccgaaatcatgcgataagacccacacatgccctccctgtccagcacccgagctgctcgggggaccctcggtgttcttgtttcctcccaaacccaaagatacccttatgattagccggacaccagaggtgacgtgcgtggtagtagacgtgtcccatgaggacccggaggtcaagttcaactggtacgtggacggagtggaggtgcacaatgcaaagaccaagccgagggaagagcaataccagtccacatatagagtcgtgtcggtccttacggtcttgcatcaggactggctgaatggcaaagaatacaaatgtaaagtctccaacaaagctctcccagcgcccattgagaaaacaatctcaaaagcgaaaggccaaccgagagaacctcaagtctatactcttcccccgtcgagagaggaaatgaccaaaaaccaggtatccctgtcatgcgcggtcaaggggttttacccaagcgacatcgccgtggagtgggagtcgaacggacagccagagaataactataagacgacccctcccgtgctggattcggatggatcgttctttcttgtcagcaaactcacagtcgacaaatcaaggtggcagcaagggaacgtgttcagctgttcggtaatgcatgaagccctccacaatcactacacgcagaaatccctgtcgctctcaccagggaagggtgggggtggctcagggggtgggggatcaggtggtggtggtagcggaggtggagggagcggaggcggaggctccggtggaggaggttccggaggtggcgggtcagggggaggagggtcatgtccgccgtgccctgcccccgaattgctgggaggtccgtccgtatttctgtttcccccgaagcctaaagatactcttatgatctcgcgaacgccggaagtaacttgtgtcgtggtagatgtctcacacgaagatcccgaagtgaaattcaattggtatgtcgacggcgtggaggtacataacgccaagacgaagcctagagaggaacagtaccagtcaacgtatcgggtcgtatccgtgctcaccgtgctccaccaggattggctgaacggaaaggagtacaagtgcaaagtctcgaacaaggcgttgcctgcgccaatcgaaaagacgatctccaaagctaagggacaaccaagggaaccacaagtgtatactctcccgccctcgcgcgaagagatgacaaagaatcaggtgtcactttggtgcttggtgaaggggttctatccctcggatattgcggtcgagtgggagagcaatggtcaaccggagaacaattacaagacgacaccgcccgtattggactccgacgggtccttctttctctactcgaagctcactgtagataagtcgcgatggcagcaggggaacgtctttagctgttccgtgatgcacgaggcacttcataaccactatacccagaagtcgttgtcgctttcccccggaaaaggaggtggagggagcggtggtgggggatcccaagtccagttgcaagaaagcgggccaggactcgtgaaaccctcggaaaccctgtcactgacgtgcacggtgagcggagggtccgtgtcgagcggagattactattggacttggattagacagtcgcccggaaaaggtctggagtggatcggacacatctactactcggggaatacgaattacaacccgtcgttgaaatcacggctcacgattagcatcgatacctccaagacgcagttctcgctcaaacttagctccgtaactgcggccgacaccgcaatctactattgtgtacgcgaccgcgtcacaggggcttttgacatttggggtcagggcactatggtgacctcgtcagcgtcgacaggtggtgggggatcaggaggaggtggctccgggggaggcggaagcggcggtgggggctccgacatccagatgacgcagtcgccctcatcattgtcagcatcagtcggggacagggtcactattacttgtcaggccagccaagatatctcgaactatctgaactggtatcagcagaagcctggaaaagcgcctaagctccttatctatgatgcgtccaatcttgagacaggggtgccgtcgcggttttccggttcagggtcgggaacggacttcacgtttacaatctccagcctgcagccggaggacgaagccacctacttctgccaacacttcgaccatttgcctcttgcgttcggaggtgggacaaaggtggagatcaagcgaact

SEQ ID NO: 225 - protein, 971 aa, Artificial Sequence
  Description of Artificial Sequence: Synthetic polypeptide
EVQLVESGGGLVQPGGSLRLSCAASGYTFTSYWLHWVRQAPGKGLEWVGMIDPSNSDTRFNPNFKDRFTISADTSKNTAYLQMNSLRAEDTAVYYCARYGSYVSPLDYWGQGTLVTVSSASTKGPSVFPLAPSSKSTSGGTAALGCLVKDYFPEPVTVSWNSGALTSGVHTFPAVLQSSGLYSLSSVVTVPSSSLGTQTYICNVNHKPSNTKVDKKVEPKSCDKTHTCPPCPAPELLGGPSVFLFPPKPKDTLMISRTPEVTCVVVDVSHEDPEVKFNWYVDGVEVHNAKTKPREEQYQSTYRVVSVLTVLHQDWLNGKEYKCKVSNKALPAPIEKTISKAKGQPREPQVYTLPPSREEMTKNQVSLSCAVKGFYPSDIAVEWESNGQPENNYKTTPPVLDSDGSFFLVSKLTVDKSRWQQGNVFSCSVMHEALHNHYTQKSLSLSPGKGGGGSGGGGSGGGGSGGGGSGGGGSGGGGSGGGGSGGGGSCPPCPAPELLGGPSVFLFPPKPKDTLMISRTPEVTCVVVDVSHEDPEVKFNWYVDGVEVHNAKTKPREEQYQSTYRVVSVLTVLHQDWLNGKEYKCKVSNKALPAPIEKTISKAKGQPREPQVYTLPPSREEMTKNQVSLWCLVKGFYPSDIAVEWESNGQPENNYKTTPPVLDSDGSFFLYSKLTVDKSRWQQGNVFSCSVMHEALHNHYTQKSLSLSPGKGGGGSGGGGSQVQLQESGPGLVKPSETLSLTCTVSGGSVSSGDYYWTWIRQSPGKGLEWIGHIYYSGNTNYNPSLKSRLTISIDTSKTQFSLKLSSVTAADTAIYYCVRDRVTGAFDIWGQGTMVTSSASTGGGGSGGGGSGGGGSGGGGSDIQMTQSPSSLSASVGDRVTITCQASQDISNYLNWYQQKPGKAPKLLIYDASNLETGVPSRFSGSGSGTDFTFTISSLQPEDEATYFCQHFDHLPLAFGGGTKVEIKRT

SEQ ID NO: 226 - DNA, 2913 bp, Artificial Sequence
  Description of Artificial Sequence: Synthetic polynucleotide
gaggtgcaactggtagaaagcggaggtggtcttgtacagcccggtggttcactcagactgtcgtgcgcagcttcagggtatacgttcacctcctactggctccattgggtgcgacaggctccggggaaaggactggaatgggtcgggatgattgatccgtcgaattcggatactaggttcaatcccaacttcaaggaccggtttaccattagcgcggatacctcgaaaaacaccgcatatctccaaatgaactcgttgagagccgaggacacggcggtgtattactgcgcaagatacgggtcgtatgtgtcaccgttggactactggggccaggggacactggtaacggtcagctcagctagcacgaagggacctagcgtgttcccattggcgcccagctcgaaatccacatcgggcggaacggcagcccttgggtgcctcgtgaaagactactttcccgaaccggtgactgtgtcgtggaattcaggggcattgacttccggtgtccacacatttccagccgtgctgcagtccagcgggttgtattcgctctcgtcagtggtcacagtcccatcctcctcgctcggaacacaaacctatatctgtaatgtcaaccataaaccttcaaatacaaaagtggacaaaaaggtagaaccgaaatcatgcgacaagacccatacatgcccaagctgtcccgctccggagtttctcggtggaccgtcggtgtttctgttccctccgaagccaaaagataccttgatgatttcgcgaactcccgaagtcacgtgtgtcgtcgtggacgtaagccaggaggacccggaggtccagttcaattggtatgtagacggcgtagaggtacataatgcgaaaacgaagcccagagaggaacagttcaatagcaaataccgcgtagtatcggtgctgacagtgttgcaccaggactggctgaatggaaaagaatacaagtgtaaagtgtccaacaagggccttccatcgtcgattgaaaagacaatctccaaggcaaaggggcagcctagggagccccaagtctacaccctgcccccttcgcgggaggagatgacgaagaaccaggtatcactgtcatgcgcggtcaaaggattttacccgagcgacatcgccgtagaatgggagtccaacggacagccagaaaacaattacaagaccactcctccagtgctcgatagcgatggctccttctttcttgtcagcaaattgacagtcgataagtcaagatggcagcagggtaatgtgttctcatgtagcgtcatgcacgaagcactccacaatcattatacacagaagagcctctcgttgtcgcccggaaaaggcggaggtgggtcgggcggagggggaagcggtggaggagggtcaggaggtggaggttccgggggaggcggttcgggaggagggggttcgggtggtggaggatcgggtggcggaggaagctgcccttcatgtccagcccccgagttcctcggaggcccgtcggtctttctttttccccctaagcctaaagataccctgatgatcagccggacgcctgaggtgacttgtgtggtagtcgacgtgtcccaagaagatccggaagtccagtttaactggtatgtggatggagtggaggtccataatgccaagacaaagccaagggaggagcaattcaactcgaagtaccgcgtcgtgtccgtgctcacagtgcttcatcaagactggttgaacggaaaggagtacaaatgtaaggtatcaaacaagggtttgccctcgtccatcgagaaaaccatctcgaaagcgaaagggcaaccccgcgagccccaggtatatacgctcccgccttcaagagaagaaatgacgaaaaaccaagtgagcttgtggtgcctggtcaaggggttctatccctccgatatcgcggtagagtgggaaagcaatgggcagccggagaacaactataagacaacgcctcccgtgttggactcagatggatcgttcttcttgtactcaaagcttacggtggacaagtcacgctggcagcaagggaacgtgttttcgtgctcggtgatgcacgaggcgcttcacaatcactacactcagaaatcgcttagcttgtcaccaggaaaaggaggtggagggagcggtggtgggggatcccaagtccagttgcaagaaagcgggccaggactcgtgaaaccctcggaaaccctgtcactgacgtgcacggtgagcggagggtccgtgtcgagcggagattactattggacttggattagacagtcgcccggaaaaggtctggagtggatcggacacatctactactcggggaatacgaattacaacccgtcgttgaaatcacggctcacgattagcatcgatacctccaagacgcagttctcgctcaaacttagctccgtaactgcggccgacaccgcaatctactattgtgtacgcgaccgcgtcacaggggcttttgacatttggggtcagggcactatggtgacctcgtcagcgtcgacaggtggtgggggatcaggaggaggtggctccgggggaggcggaagcggcggtgggggctccgacatccagatgacgcagtcgccctcatcattgtcagcatcagtcggggacagggtcactattacttgtcaggccagccaagatatctcgaactatctgaactggtatcagcagaagcctggaaaagcgcctaagctccttatctatgatgcgtccaatcttgagacaggggtgccgtcgcggttttccggttcagggtcgggaacggacttcacgtttacaatctccagcctgcagccggaggacgaagccacctacttctgccaacacttcgaccatttgcctcttgcgttcggaggtgggacaaaggtggagatcaagcgaact

SEQ ID NO: 227 - protein, 971 aa, Artificial Sequence
  Description of Artificial Sequence: Synthetic polypeptide
EVQLVESGGGLVQPGGSLRLSCAASGYTFTSYWLHWVRQAPGKGLEWVGMIDPSNSDTRFNPNFKDRFTISADTSKNTAYLQMNSLRAEDTAVYYCARYGSYVSPLDYWGQGTLVTVSSASTKGPSVFPLAPSSKSTSGGTAALGCLVKDYFPEPVTVSWNSGALTSGVHTFPAVLQSSGLYSLSSVVTVPSSSLGTQTYICNVNHKPSNTKVDKKVEPKSCDKTHTCPSCPAPEFLGGPSVFLFPPKPKDTLMISRTPEVTCVVVDVSQEDPEVQFNWYVDGVEVHNAKTKPREEQFNSKYRVVSVLTVLHQDWLNGKEYKCKVSNKGLPSSIEKTISKAKGQPREPQVYTLPPSREEMTKNQVSLSCAVKGFYPSDIAVEWESNGQPENNYKTTPPVLDSDGSFFLVSKLTVDKSRWQQGNVFSCSVMHEALHNHYTQKSLSLSPGKGGGGSGGGGSGGGGSGGGGSGGGGSGGGGSGGGGSGGGGSCPSCPAPEFLGGPSVFLFPPKPKDTLMISRTPEVTCVVVDVSQEDPEVQFNWYVDGVEVHNAKTKPREEQFNSKYRVVSVLTVLHQDWLNGKEYKCKVSNKGLPSSIEKTISKAKGQPREPQVYTLPPSREEMTKNQVSLWCLVKGFYPSDIAVEWESNGQPENNYKTTPPVLDSDGSFFLYSKLTVDKSRWQQGNVFSCSVMHEALHNHYTQKSLSLSPGKGGGGSGGGGSQVQLQESGPGLVKPSETLSLTCTVSGGSVSSGDYYWTWIRQSPGKGLEWIGHIYYSGNTNYNPSLKSRLTISIDTSKTQFSLKLSSVTAADTAIYYCVRDRVTGAFDIWGQGTMVTSSASTGGGGSGGGGSGGGGSGGGGSDIQMTQSPSSLSASVGDRVTITCQASQDISNYLNWYQQKPGKAPKLLIYDASNLETGVPSRFSGSGSGTDFTFTISSLQPEDEATYFCQHFDHLPLAFGGGTKVEIKRT

SEQ ID NO: 228 - DNA, 2913 bp, Artificial Sequence; identical to SEQ ID NO: 226
  Description of Artificial Sequence: Synthetic polynucleotide

SEQ ID NO: 229 - protein, 971 aa, Artificial Sequence; identical to SEQ ID NO: 227
  Description of Artificial Sequence: Synthetic polypeptide

SEQ ID NO: 230 - DNA, 660 bp, Artificial Sequence
  Description of Artificial Sequence: Synthetic polynucleotide
gacattcagatgacacagtcgccgtcgtcgcttagcgcgtcagtgggagatagggtgacgattacgtgcaagtcatcccagtcgctgttgtatacatcgagccagaagaactacctcgcgtggtaccaacagaagccggggaaagcgcccaaactcctgatctattgggcctcgaccagagagtccggagtaccatcgcgcttctcaggcagcgggagcgggacggacttcacactgacgatctcctccttgcaacccgaagattttgctacgtattactgtcaacaatactatgcctacccctggacctttggccagggtactaaggtcgagatcaaacgtacggtggccgctccctccgtctttatctttcctccaagcgacgagcagctgaagtctggcaccgcaagtgtggtgtgtctgctgaacaatttctaccccagggaagccaaagtgcaatggaaagtggataacgctctgcagtcaggaaattcccaggagagcgtcacagaacaagactctaaagatagtacttattcactgtccagcaccctgacactgtctaaggccgattatgagaaacacaaggtgtatgcctgtgaagtcactcatcaggggctgagttcacctgtgaccaaatcctttaacagaggtgagtgc

SEQ ID NO: 231 - protein, 220 aa, Artificial Sequence
  Description of Artificial Sequence: Synthetic polypeptide
DIQMTQSPSSLSASVGDRVTITCKSSQSLLYTSSQKNYLAWYQQKPGKAPKLLIYWASTRESGVPSRFSGSGSGTDFTLTISSLQPEDFATYYCQQYYAYPWTFGQGTKVEIKRTVAAPSVFIFPPSDEQLKSGTASVVCLLNNFYPREAKVQWKVDNALQSGNSQESVTEQDSKDSTYSLSSTLTLSKADYEKHKVYACEVTHQGLSSPVTKSFNRGEC

SEQ ID NO: 232 - DNA, 750 bp, Artificial Sequence
  Description of Artificial Sequence: Synthetic polynucleotide
caagtccagttgcaagaaagcgggccaggactcgtgaaaccctcggaaaccctgtcactgacgtgcacggtgagcggagggtccgtgtcgagcggagattactattggacttggattagacagtcgcccggaaaaggtctggagtggatcggacacatctactactcggggaatacgaattacaacccgtcgttgaaatcacggctcacgattagcatcgatacctccaagacgcagttctcgctcaaacttagctccgtaactgcggccgacaccgcaatctactattgtgtacgcgaccgcgtcacaggggcttttgacatttggggtcagggcactatggtgacctcgtcagcgtcgacaggtggtgggggatcaggaggaggtggctccgggggaggcggaagcggcggtgggggctccgacatccagatgacgcagtcgccctcatcattgtcagcatcagtcggggacagggtcactattacttgtcaggccagccaagatatctcgaactatctgaactggtatcagcagaagcctggaaaagcgcctaagctccttatctatgatgcgtccaatcttgagacaggggtgccgtcgcggttttccggttcagggtcgggaacggacttcacgtttacaatctccagcctgcagccggaggacgaagccacctacttctgccaacacttcgaccatttgcctcttgcgttcggaggtgggacaaaggtggagatcaagcgaact

SEQ ID NO: 233 - protein, 250 aa, Artificial Sequence
  Description of Artificial Sequence: Synthetic polypeptide
QVQLQESGPGLVKPSETLSLTCTVSGGSVSSGDYYWTWIRQSPGKGLEWIGHIYYSGNTNYNPSLKSRLTISIDTSKTQFSLKLSSVTAADTAIYYCVRDRVTGAFDIWGQGTMVTSSASTGGGGSGGGGSGGGGSGGGGSDIQMTQSPSSLSASVGDRVTITCQASQDISNYLNWYQQKPGKAPKLLIYDASNLETGVPSRFSGSGSGTDFTFTISSLQPEDEATYFCQHFDHLPLAFGGGTKVEIKRT

SEQ ID NO: 234 - DNA, 2922 bp, Artificial Sequence
  Description of Artificial Sequence: Synthetic polynucleotide
gaggtgcaactggtagaaagcggaggtggtcttgtacagcccggtggttcactcagactgtcgtgcgcagcttcagggtatacgttcacctcctactggctccattgggtgcgacaggctccggggaaaggactggaatgggtcgggatgattgatccgtcgaattcggatactaggttcaatcccaacttcaaggaccggtttaccattagcgcggatacctcgaaaaacaccgcatatctccaaatgaactcgttgagagccgaggacacggcggtgtattactgcgcaagatacgggtcgtatgtgtcaccgttggactactggggccaggggacactggtaacggtcagctcagctagcacgaagggacctagcgtgttcccattggcgcccagctcgaaatccacatcgggcggaacggcagcccttgggtgcctcgtgaaagactactttcccgaaccggtgactgtgtcgtggaattcaggggcattgacttccggtgtccacacatttccagccgtgctgcagtccagcgggttgtattcgctctcgtcagtggtcacagtcccatcctcctcgctcggaacacaaacctatatctgtaatgtcaaccataaaccttcaaatacaaaagtggacaaaaaggtagaaccgaaatcatgcgataaaacacacacatgcccaccatgcccagcgcctgaacttttgggaggtccctcggtgtttttgtttcctcctaagcctaaggacaccctgatgatctcccgcactccggaagtgacgtgtgtcgtagtcgacgtcagccatgaggaccctgaggtgaaattcaactggtacgtagatggtgtggaggtgcataatgcaaaaactaagcctcgggaggaacaatatcaaagcacataccgggtcgtgtccgtgctcacggtacttcatcaggattggctcaacgggaaagaatacaaatgtaaggtgtccaacaaggctctcccggcaccgattgagaaaacgatcagcaaggccaaggggcagccccgagaaccccaagtatacacacttcccccgtccagggaggagatgaccaagaaccaggtgtcgctgtcgtgtgcggtcaaggggttttatcccagcgacatcgcggtagagtgggagtcgaacggccagcccgagaacaactacaagacaacaccgcctgtattggactcggacgggtcgtttttcctggtcagcaagctcacagtggataaaagccgctggcagcaggggaatgtattctcctgctccgtcatgcacgaggcgcttcacaaccattacacgcaaaaatccctgtccttgtccaagtcatgcgacaagacgggaggaggagggtcaggcggaggaggaagcgggggtggagggtccggtggtggtgggagcggaggtggagggagcggtggaggtggtagcgggggaggtggatcgggagggggtgggagctgtccgccatgtccagccccggaacttctcgggggaccgtcagtctttctttttccgccgaagcccaaggacaccttgatgattagccgcacgccggaggtcacgtgcgtagtagtggatgtatcccacgaggaccccgaggtcaaattcaattggtatgtcgacggagtggaagtacacaacgcaaagacaaagccgagagaagagcagtaccaatccacttatagggtagtctcggtcttgacagtactgcaccaggactggcttaatggaaaggaatacaagtgcaaagtctcaaacaaagccctccccgcacccatcgaaaagacaatctcgaaagcgaaaggacagcccagagagcctcaagtgtataccctgcccccgtcaagagaagagatgacgaagaaccaagtgtccctctggtgtctcgtgaaaggtttttaccccagcgatattgccgtcgaatgggaaagcaatggtcagcccgaaaacaattacaagactacgcctcccgtattggattcggatggttcgttcttcttgtactcaaagcttactgtcgataagtcgcggtggcagcaaggcaatgtgtttagctgttcggtaatgcatgaggcgctccacaatcactatacacagaagagcttgtccctcagcggggagtgcggaggtggagggagcggtggtgggggatcccaagtccagttgcaagaaagcgggccaggactcgtgaaaccctcggaaaccctgtcactgacgtgcacggtgagcggagggtccgtgtcgagcggagattactattggacttggattagacagtcgcccggaaaaggtctggagtggatcggacacatctactactcggggaatacgaattacaacccgtcgttgaaatcacggctcacgattagcatcgatacctccaagacgcagttctcgctcaaacttagctccgtaactgcggccgacaccgcaatctactattgtgtacgcgaccgcgtcacaggggcttttgacatttggggtcagggcactatggtgacctcgtcagcgtcgacaggtggtgggggatcaggaggaggtggctccgggggaggcggaagcggcggtgggggctccgacatccagatgacgcagtcgccctcatcattgtcagcatcagtcggggacagggtcactattacttgtcaggccagccaagatatctcgaactatctgaactggtatcagcagaagcctggaaaagcgcctaagctccttatctatgatgcgtccaatcttgagacaggggtgccgtcgcggttttccggttcagggtcgggaacggacttcacgtttacaatctccagcctgcagccggaggacgaagccacctacttctgccaacacttcgaccatttgcctcttgcgttcggaggtgggacaaaggtggagatcaagcgaact

SEQ ID NO: 235 - protein, 974 aa, Artificial Sequence
  Description of Artificial Sequence: Synthetic polypeptide
EVQLVESGGGLVQPGGSLRLSCAASGYTFTSYWLHWVRQAPGKGLEWVGMIDPSNSDTRFNPNFKDRFTISADTSKNTAYLQMNSLRAEDTAVYYCARYGSYVSPLDYWGQGTLVTVSSASTKGPSVFPLAPSSKSTSGGTAALGCLVKDYFPEPVTVSWNSGALTSGVHTFPAVLQSSGLYSLSSVVTVPSSSLGTQTYICNVNHKPSNTKVDKKVEPKSCDKTHTCPPCPAPELLGGPSVFLFPPKPKDTLMISRTPEVTCVVVDVSHEDPEVKFNWYVDGVEVHNAKTKPREEQYQSTYRVVSVLTVLHQDWLNGKEYKCKVSNKALPAPIEKTISKAKGQPREPQVYTLPPSREEMTKNQVSLSCAVKGFYPSDIAVEWESNGQPENNYKTTPPVLDSDGSFFLVSKLTVDKSRWQQGNVFSCSVMHEALHNHYTQKSLSLSKSCDKTGGGGSGGGGSGGGGSGGGGSGGGGSGGGGSGGGGSGGGGSCPPCPAPELLGGPSVFLFPPKPKDTLMISRTPEVTCVVVDVSHEDPEVKFNWYVDGVEVHNAKTKPREEQYQSTYRVVSVLTVLHQDWLNGKEYKCKVSNKALPAPIEKTISKAKGQPREPQVYTLPPSREEMTKNQVSLWCLVKGFYPSDIAVEWESNGQPENNYKTTPPVLDSDGSFFLYSKLTVDKSRWQQGNVFSCSVMHEALHNHYTQKSLSLSGECGGGGSGGGGSQVQLQESGPGLVKPSETLSLTCTVSGGSVSSGDYYWTWIRQSPGKGLEWIGHIYYSGNTNYNPSLKSRLTISIDTSKTQFSLKLSSVTAADTAIYYCVRDRVTGAFDIWGQGTMVTSSASTGGGGSGGGGSGGGGSGGGGSDIQMTQSPSSLSASVGDRVTITCQASQDISNYLNWYQQKPGKAPKLLIYDASNLETGVPSRFSGSGSGTDFTFTISSLQPEDEATYFCQHFDHLPLAFGGGTKVEIKRT

SEQ ID NO: 236 - DNA, 771 bp, Artificial Sequence
  Description of Artificial Sequence: Synthetic polynucleotide
gaggtgcaactggtccagtcaggggcggaggtcaagaagcccggaagctccgtaaaggtatcatgcaaggcctcgggtggaaccttctcctcgtacgccatcggttgggtgagacaagctcccgggcagggcctcgaatggatgggcggaatcattcccatctttggaatcgcgaactatgcgcagaaatttcagggtagagtaacgattacagcggatgaatcgacttcgtccgcatacatggagctttcgtcacttcggtcagaggacactgccgtgtattactgtgcgcgggaggaaggcccgtattgtagctcgacctcgtgctacgctgcctttgacatttgggggcagggaacacttgtcacagtatcgagcgcgtccacgggcggagggggaagcggaggtgggggatcgggagggggaggatcagggggagggggctcccagagcgtgttgacccaagatccagctgtgtccgtcgcactgggacagacggtcaaaatcacgtgccagggtgactcgcttcgctcgtacttcgcgtcatggtatcagcaaaaacctggtcaggcaccgacgttggtgatgtacgcaaggaatgatcgacctgccggggtcccggacaggttctcggggagcaagagcgggacatccgcgtcgttggcgatctccggcctccagcccgaagatgaggccgattactattgtgcagcgtgggacgactcactgaacgggtatctcttcggggcaggcactaaactcacggtgttg

SEQ ID NO: 237 - protein, 257 aa, Artificial Sequence
  Description of Artificial Sequence: Synthetic polypeptide
EVQLVQSGAEVKKPGSSVKVSCKASGGTFSSYAIGWVRQAPGQGLEWMGGIIPIFGIANYAQKFQGRVTITADESTSSAYMELSSLRSEDTAVYYCAREEGPYCSSTSCYAAFDIWGQGTLVTVSSASTGGGGSGGGGSGGGGSGGGGSQSVLTQDPAVSVALGQTVKITCQGDSLRSYFASWYQQKPGQAPTLVMYARNDRPAGVPDRFSGSKSGTSASLAISGLQPEDEADYYCAAWDDSLNGYLFGAGTKLTVL

SEQ ID NO: 238 - DNA, 2943 bp, Artificial Sequence
  Description of Artificial Sequence: Synthetic polynucleotide
gaggtgcaactggtagaaagcggaggtggtcttgtacagcccggtggttcactcagactgtcgtgcgcagcttcagggtatacgttcacctcctactggctccattgggtgcgacaggctccggggaaaggactggaatgggtcgggatgattgatccgtcgaattcggatactaggttcaatcccaacttcaaggaccggtttaccattagcgcggatacctcgaaaaacaccgcatatctccaaatgaactcgttgagagccgaggacacggcggtgtattactgcgcaagatacgggtcgtatgtgtcaccgttggactactggggccaggggacactggtaacggtcagctcagctagcacgaagggacctagcgtgttcccattggcgcccagctcgaaatccacatcgggcggaacggcagcccttgggtgcctcgtgaaagactactttcccgaaccggtgactgtgtcgtggaattcaggggcattgacttccggtgtccacacatttccagccgtgctgcagtccagcgggttgtattcgctctcgtcagtggtcacagtcccatcctcctcgctcggaacacaaacctatatctgtaatgtcaaccataaaccttcaaatacaaaagtggacaaaaaggtagaaccgaaatcatgcgataaaacacacacatgcccaccatgcccagcgcctgaacttttgggaggtccctcggtgtttttgtttcctcctaagcctaaggacaccctgatgatctcccgcactccggaagtgacgtgtgtcgtagtcgacgtcagccatgaggaccctgaggtgaaattcaactggtacgtagatggtgtggaggtgcataatgcaaaaactaagcctcgggaggaacaatatcaaagcacataccgggtcgtgtccgtgctcacggtacttcatcaggattggctcaacgggaaagaatacaaatgtaaggtgtccaacaaggctctcccggcaccgattgagaaaacgatcagcaaggccaaggggcagccccgagaaccccaagtatacacacttcccccgtccagggaggagatgaccaagaaccaggtgtcgctgtcgtgtgcggtcaaggggttttatcccagcgacatcgcggtagagtgggagtcgaacggccagcccgagaacaactacaagacaacaccgcctgtattggactcggacgggtcgtttttcctggtcagcaagctcacagtggataaaagccgctggcagcaggggaatgtattctcctgctccgtcatgcacgaggcgcttcacaaccattacacgcaaaaatccctgtccttgtccaagtcatgcgacaagacgggaggaggagggtcaggcggaggaggaagcgggggtggagggtccggtggtggtgggagcggaggtggagggagcggtggaggtggtagcgggggaggtggatcgggagggggtgggagctgtccgccatgtccagccccggaacttctcgggggaccgtcagtctttctttttccgccgaagcccaaggacaccttgatgattagccgcacgccggaggtcacgtgcgtagtagtggatgtatcccacgaggaccccgaggtcaaattcaattggtatgtcgacggagtggaagtacacaacgcaaagacaaagccgagagaagagcagtaccaatccacttatagggtagtctcggtcttgacagtactgcaccaggactggcttaatggaaaggaatacaagtgcaaagtctcaaacaaagccctccccgcacccatcgaaaagacaatctcgaaagcgaaaggacagcccagagagcctcaagtgtataccctgcccccgtcaagagaagagatgacgaagaaccaagtgtccctctggtgtctcgtgaaaggtttttaccccagcgatattgccgtcgaatgggaaagcaatggtcagcccgaaaacaattacaagactacgcctcccgtattggattcggatggttcgttcttcttgtactcaaagcttactgtcgataagtcgcggtggcagcaaggcaatgtgtttagctgttcggtaatgcatgaggcgctccacaatcactatacacagaagagcttgtccctcagcggggagtgcggaggtggagggagcggtggtgggggatccgaggtgcaactggtccagtcaggggcggaggtcaagaagcccggaagctccgtaaaggtatcatgcaaggcctcgggtggaaccttctcctcgtacgccatcggttgggtgagacaagctcccgggcagggcctcgaatggatgggcggaatcattcccatctttggaatcgcgaactatgcgcagaaatttcagggtagagtaacgattacagcggatgaatcgacttcgtccgcatacatggagctttcgtcacttcggtcagaggacactgccgtgtattactgtgcgcgggaggaaggcccgtattgtagctcgacctcgtgctacgctgcctttgacatttgggggcagggaacacttgtcacagtatcgagcgcgtccacgggcggagggggaagcggaggtgggggatcgggagggggaggatcagggggagggggctcccagagcgtgttgacccaagatccagctgtgtccgtcgcactgggacagacggtcaaaatcacgtgccagggtgactcgcttcgctcgtacttcgcgtcatggtatcagcaaaaacctggtcaggcaccgacgttggtgatgtacgcaaggaatgatcgacctgccggggtcccggacaggttctcggggagcaagagcgggacatccgcgtcgttggcgatctccggcctccagcccgaagatgaggccgattactattgtgcagcgtgggacgactcactgaacgggtatctcttcggggcaggcactaaactcacggtgttg

SEQ ID NO: 239 - protein, 981 aa, Artificial Sequence [sequence omitted]

SEQ ID NO: 240 - DNA, 57 bp, Artificial Sequence
  Description of Artificial Sequence: Synthetic oligonucleotide
atgggcttcggactgtcgtggctttttctggtggcgattcttaagggggtccagtgc

SEQ ID NO: 241 - protein, 19 aa, Artificial Sequence
  Description of Artificial Sequence: Synthetic peptide
MGFGLSWLFLVAILKGVQC

SEQ ID NO: 242 - DNA, 60 bp, Artificial Sequence
  Description of Artificial Sequence: Synthetic oligonucleotide
atgggcacccccgcacagctcttgttcttgctgcttctttggctccctgacacaactggt

SEQ ID NO: 243 - protein, 20 aa, Artificial Sequence
  Description of Artificial Sequence: Synthetic peptide
MGTPAQLLFLLLLWLPDTTG

SEQ ID NO: 244 - DNA, 708 bp, Artificial Sequence
  Description of Artificial Sequence: Synthetic polynucleotide
atgggctttggactttcgtggctttttctcgtagcgattttgaagggcgtgcagtgcgaggtgcaactggtagaaagcggaggtggtcttgtacagcccggtggttcactcagactgtcgtgcgcagcttcagggtatacgttcacctcctactggctccattgggtgcgacaggctccggggaaaggactggaatgggtcgggatgattgatccgtcgaattcggatactaggttcaatcccaacttcaaggaccggtttaccattagcgcggatacctcgaaaaacaccgcatatctccaaatgaactcgttgagagccgaggacacggcggtgtattactgcgcaagatacgggtcgtatgtgtcaccgttggactactggggccaggggacactggtaacggtcagctcagctagcacgaagggacctagcgtgttcccattggcgcccagctcgaaatccacatcgggcggaacggcagcccttgggtgcctcgtgaaagactactttcccgaaccggtgactgtgtcgtggaattcaggggcattgacttccggtgtccacacatttccagccgtgctgcagtccagcgggttgtattcgctctcgtcagtggtcacagtcccatcctcctcgctcggaacacaaacctatatctgtaatgtcaaccataaaccttcaaatacaaaagtggacaaaaaggta

SEQ ID NO: 245 - protein, 236 aa, Artificial Sequence
  Description of Artificial Sequence: Synthetic polypeptide
MGFGLSWLFLVAILKGVQCEVQLVESGGGLVQPGGSLRLSCAASGYTFTSYWLHWVRQAPGKGLEWVGMIDPSNSDTRFNPNFKDRFTISADTSKNTAYLQMNSLRAEDTAVYYCARYGSYVSPLDYWGQGTLVTVSSASTKGPSVFPLAPSSKSTSGGTAALGCLVKDYFPEPVTVSWNSGALTSGVHTFPAVLQSSGLYSLSSVVTVPSSSLGTQTYICNVNHKPSNTKVDKKV

SEQ ID NO: 246 - DNA, 720 bp, Artificial Sequence
  Description of Artificial Sequence: Synthetic polynucleotide
atgggcacccccgcacagctcttgttcttgctgcttctttggctccctgacacaactggtgacattcagatgacacagtcgccgtcgtcgcttagcgcgtcagtgggagatagggtgacgattacgtgcaagtcatcccagtcgctgttgtatacatcgagccagaagaactacctcgcgtggtaccaacagaagccggggaaagcgcccaaactcctgatctattgggcctcgaccagagagtccggagtaccatcgcgcttctcaggcagcgggagcgggacggacttcacactgacgatctcctccttgcaacccgaagattttgctacgtattactgtcaacaatactatgcctacccctggacctttggccagggtactaaggtcgagatcaaacgtacggtggccgctccctccgtctttatctttcctccaagcgacgagcagctgaagtctggcaccgcaagtgtggtgtgtctgctgaacaatttctaccccagggaagccaaagtgcaatggaaagtggataacgctctgcagtcaggaaattcccaggagagcgtcacagaacaagactctaaagatagtacttattcactgtccagcaccctgacactgtctaaggccgattatgagaaacacaaggtgtatgcctgtgaagtcactcatcaggggctgagttcacctgtgaccaaatcctttaacagaggtgagtgc

SEQ ID NO: 247 - protein, 240 aa, Artificial Sequence
  Description of Artificial Sequence: Synthetic polypeptide
MGTPAQLLFLLLLWLPDTTGDIQMTQSPSSLSASVGDRVTITCKSSQSLLYTSSQKNYLAWYQQKPGKAPKLLIYWASTRESGVPSRFSGSGSGTDFTLTISSLQPEDFATYYCQQYYAYPWTFGQGTKVEIKRTVAAPSVFIFPPSDEQLKSGTASVVCLLNNFYPREAKVQWKVDNALQSGNSQESVTEQDSKDSTYSLSSTLTLSKADYEKHKVYACEVTHQGLSSPVTKSFNRGEC

SEQ ID NO: 248 - protein, 12 aa, Artificial Sequence
  Description of Artificial Sequence: Synthetic peptide
PRDCGCKPCICT

SEQ ID NO: 249 - protein, 12 aa, Artificial Sequence
  Description of Artificial Sequence: Synthetic peptide
PKSCGCKPCICT

SEQ ID NO: 250 - protein, 12 aa, Artificial Sequence
  Description of Artificial Sequence: Synthetic peptide
PKSCGCKPCICP

SEQ ID NO: 251 - protein, 13 aa, Artificial Sequence
  Description of Artificial Sequence: Synthetic peptide
PRDCGCKPCPPCP

SEQ ID NO: 252 - protein, 13 aa, Artificial Sequence
  Description of Artificial Sequence: Synthetic peptide
PRDCGCHTCPPCP

SEQ ID NO: 253 - protein, 12 aa, Artificial Sequence
  Description of Artificial Sequence: Synthetic peptide
PKSCDCHCPPCP

SEQ ID NO: 254 - protein, 11 aa, Artificial Sequence
  Description of Artificial Sequence: Synthetic peptide
RKCCVECPPCP

SEQ ID NO: 255 - DNA, 705 bp, Artificial Sequence
  Description of Artificial Sequence: Synthetic polynucleotide
atgggattcggactctcctggttgtttttggtggcaattctcaagggcgtccaatgtcaggtacaacttgtgcagtcaggagcggaggtgaagaagcctggtgcatcggtcaaagtgtcatgcaaagcctcggggtacatctttactgcgtacacaatgcactgggtcagacaggctccgggacaaggtctggaatggatggggtggatcaagcccaataacgggctcgcgaattacgcccagaaattccaggggagagtgactatgacaagggatacgagcatttcgacggcgtatatggagctctcgcgcctgcggtcagatgacacagccgtatactattgcgcgcgatcggaaatcaccaccgaattcgactattggggtcagggaactcttgtcacggtatccagcgctagcaccaagggcccgtcagtattcccgcttgcaccctcgtcgaaatcaacatcgggcggaacagcagcccttggctgcttggtaaaagactacttcccagagccagtaacggtatcgtggaattccggagctcttacgtcgggggtccatacatttcccgcggtactccaatcgtcgggactgtactcattgtcgtcagtcgtgaccgtgccatccagctccttgggaacccagacttacatctgcaacgtcaaccacaagccctcgaacactaaagtggacaagaaagtg

SEQ ID NO: 256 - protein, 235 aa, Artificial Sequence
  Description of Artificial Sequence: Synthetic polypeptide
MGFGLSWLFLVAILKGVQCQVQLVQSGAEVKKPGASVKVSCKASGYIFTAYTMHWVRQAPGQGLEWMGWIKPNNGLANYAQKFQGRVTMTRDTSISTAYMELSRLRSDDTAVYYCARSEITTEFDYWGQGTLVTVSSASTKGPSVFPLAPSSKSTSGGTAALGCLVKDYFPEPVTVSWNSGALTSGVHTFPAVLQSSGLYSLSSVVTVPSSSLGTQTYICNVNHKPSNTKVDKKV

SEQ ID NO: 257 - DNA, 753 bp, Artificial Sequence
  Description of Artificial Sequence: Synthetic polynucleotide
caggtgcagctggtggagagcggcggcggcgtggtgcagcccggcgagagcctgagactgagctgcgccgtgagcggcttcagcctgaccaactacggcgtgcactgggtgagacaggcccccggcaagggcctggagtgggtgggcgtgatctggagcggcggcaacaccgactacaacacccccttcaccagcagattcaccatcagcaaggacaacagcaagaacaccgtgtacctgcagatgaacagcctgagagccgaggacaccgccgtgtactactgcgccagagccctgacctactacgactacgagttcgcctactggggccagggcaccctggtgaccgtgagcagcgccagcaccggcggcggcggcagcggcggcggcggcagcggcggcggcggcagcggcggcggcggcagcgacatcgtgctgacccagagccccgacttccagagcgtgacccccggcgagaaggtgaccatcacctgcagagccagccagagcatcggcaccaacatccactggtaccagcagaagcccgaccagagccccaagctgctgatcaagtacgccagcgagagcatcagcggcgtgcccagcagattcagcggcagcggcagcggcaccgacttcaccctgaccatcaacagcctggaggccgaggacgaggccacctactactgccagcagaacaacaactggcccaccaccttcggccagggcaccaaggtggagatcaagagaacc

SEQ ID NO: 258 - protein, 251 aa, Artificial Sequence
  Description of Artificial Sequence: Synthetic polypeptide
QVQLVESGGGVVQPGESLRLSCAVSGFSLTNYGVHWVRQAPGKGLEWVGVIWSGGNTDYNTPFTSRFTISKDNSKNTVYLQMNSLRAEDTAVYYCARALTYYDYEFAYWGQGTLVTVSSASTGGGGSGGGGSGGGGSGGGGSDIVLTQSPDFQSVTPGEKVTITCRASQSIGTNIHWYQQKPDQSPKLLIKYASESISGVPSRFSGSGSGTDFTLTINSLEAEDEATYYCQQNNNWPTTFGQGTKVEIKRT

SEQ ID NO: 259 - DNA, 2925 bp, Artificial Sequence
  Description of Artificial Sequence: Synthetic polynucleotide
gaggtgcaactggtagaaagcggaggtggtcttgtacagcccggtggttcactcagactgtcgtgcgcagcttcagggtatacgttcacctcctactggctccattgggtgcgacaggctccggggaaaggactggaatgggtcgggatgattgatccgtcgaattcggatactaggttcaatcccaacttcaaggaccggtttaccattagcgcggatacctcgaaaaacaccgcatatctccaaatgaactcgttgagagccgaggacacggcggtgtattactgcgcaagatacgggtcgtatgtgtcaccgttggactactggggccaggggacactggtaacggtcagctcagctagcacgaagggacctagcgtgttcccattggcgcccagctcgaaatccacatcgggcggaacggcagcccttgggtgcctcgtgaaagactactttcccgaaccggtgactgtgtcgtggaattcaggggcattgacttccggtgtccacacatttccagccgtgctgcagtccagcgggttgtattcgctctcgtcagtggtcacagtcccatcctcctcgctcggaacacaaacctatatctgtaatgtcaaccataaaccttcaaatacaaaagtggacaaaaaggtagaaccgaaatcatgcgataaaacacacacatgcccaccatgcccagcgcctgaacttttgggaggtccctcggtgtttttgtttcctcctaagcctaaggacaccctgatgatctcccgcactccggaagtgacgtgtgtcgtagtcgacgtcagccatgaggaccctgaggtgaaattcaactggtacgtagatggtgtggaggtgcataatgcaaaaactaagcctcgggaggaacaatatcaaagcacataccgggtcgtgtccgtgctcacggtacttcatcaggattggctcaacgggaaagaatacaaatgtaaggtgtccaacaaggctctcccggcaccgattgagaaaacgatcagcaaggccaaggggcagccccgagaaccccaagtatacacacttcccccgtccagggaggagatgaccaagaaccaggtgtcgctgtcgtgtgcggtcaaggggttttatcccagcgacatcgcggtagagtgggagtcgaacggccagcccgagaacaactacaagacaacaccgcctgtattggactcggacgggtcgtttttcctggtcagcaagctcacagtggataaaagccgctggcagcaggggaatgtattctcctgctccgtcatgcacgaggcgcttcacaaccattacacgcaaaaatccctgtccttgtccaagtcatgcgacaagacgggaggaggagggtcaggcggaggaggaagcgggggtggagggtccggtggtggtgggagcggaggtggagggagcggtggaggtggtagcgggggaggtggatcgggagggggtgggagctgtccgccatgtccagccccggaacttctcgggggaccgtcagtctttctttttccgccgaagcccaaggacaccttgatgattagccgcacgccggaggtcacgtgcgtagtagtggatgtatcccacgaggaccccgaggtcaaattcaattggtatgtcgacggagtggaagtacacaacgcaaagacaaagccgagagaagagcagtaccaatccacttatagggtagtctcggtcttgacagtactgcaccaggactggcttaatggaaaggaatacaagtgcaaagtctcaaacaaagccctccccgcacccatcgaaaagacaatctcgaaagcgaaaggacagcccagagagcctcaagtgtataccctgcccccgtcaagagaagagatgacgaagaaccaagtgtccctctggtgtctcgtgaaaggtttttaccccagcgatattgccgtcgaatgggaaagcaatggtcagcccgaaaacaattacaagactacgcctcccgtattggattcggatggttcgttcttcttgtactcaaagcttactgtcgataagtcgcggtggcagcaaggcaatgtgtttagctgttcggtaatgcatgaggcgctccacaatcactatacacagaagagcttgtccctcagcggggagtgcggaggtggagggagcggtggtgggggatcccaggtgcagctggtggagagcggcggcggcgtggtgcagcccggcgagagcctgagactgagctgcgccgtgagcggcttcagcctgaccaactacggcgtgcactgggtgagacaggcccccggcaagggcctggagtgggtgggcgtgatctggagcggcggcaacaccgactacaacacccccttcaccagcagattcaccatcagcaaggacaacagcaagaacaccgtgtacctgcagatgaacagcctgagagccgaggacaccgccgtgtactactgcgccagagccctgacctactacgactacgagttcgcctactggggccagggcaccctggtgaccgtgagcagcgccagcaccggcggcggcggcagcggcggcggcggcagcggcggcggcggcagcggcggcggcggcagcgacatcgtgctgacccagagccccgacttccagagcgtgacccccggcgagaaggtgaccatcacctgcagagccagccagagcatcggcaccaacatccactggtaccagcagaagcccgaccagagccccaagctgctgatcaagtacgccagcgagagcatcagcggcgtgcccagcagattcagcggcagcggcagcggcaccgacttcaccctgaccatcaacagcctggaggccgaggacgaggccacctactactgccagcagaacaacaactggcccaccaccttcggccagggcaccaaggtggagatcaagagaacc

SEQ ID NO: 260 - protein, 975 aa, Artificial Sequence [sequence omitted]

SEQ ID NO: 261 - protein, 104 aa, Homo sapiens
GPSVFLFPPKPKDTLMISRTPEVTCVVVDVSHEDPEVKFNWYVDGVEVHNAKTKPREEQYNSTYRVVSVLTVLHQDWLNGKEYKCKVSNKALPAPIEKTISKAK

SEQ ID NO: 262 - protein, 104 aa, Homo sapiens
GPSVFLFPPKPKDTLMISRTPEVTCVVVDVSQEDPEVQFNWYVDGVEVHNAKTKPREEQFNSTYRVVSVLTVLHQDWLNGKEYKCKVSNKGLPSSIEKTISKAK

SEQ ID NO: 263 - protein, 15 aa, Artificial Sequence
  Description of Artificial Sequence: Synthetic peptide
PPPPCDKTHTCPPCP

SEQ ID NO: 264 - protein, 13 aa, Artificial Sequence
  Description of Artificial Sequence: Synthetic peptide
EPKSCPPPCPPCP

SEQ ID NO: 265 - protein, 14 aa, Artificial Sequence
  Description of Artificial Sequence: Synthetic peptide
EPKSCPPCPCPPCP

SEQ ID NO: 266 - protein, 13 aa, Mus sp.
VPRDCGCKPCICT

SEQ ID NO: 267 - protein, 14 aa, Artificial Sequence
  Description of Artificial Sequence: Synthetic peptide
VPRDCTIKPCPPCP

SEQ ID NO: 268 - protein, 12 aa, Artificial Sequence
  Description of Artificial Sequence: Synthetic peptide
ERKPCVECPPCP

SEQ ID NO: 269 - protein, 12 aa, Artificial Sequence
  Description of Artificial Sequence: Synthetic peptide
ERKCPVECPPCP

SEQ ID NO: 270 - protein, 6 aa, Homo sapiens
VPPPPP

SEQ ID NO: 271 - protein, 15 aa, Artificial Sequence
  Description of Artificial Sequence: Synthetic peptide
EPKSCPCPPPPPCCP

SEQ ID NO: 272 - protein, 14 aa, Artificial Sequence
  Description of Artificial Sequence: Synthetic peptide
EPKSCPCPPPPCCP

SEQ ID NO: 273 - protein, 15 aa, Artificial Sequence
  Description of Artificial Sequence: Synthetic peptide
EPKSCPVPPPPPCCP

SEQ ID NO: 274 - DNA, 753 bp, Artificial Sequence
  Description of Artificial Sequence: Synthetic polynucleotide
caggtgcagctggtggagagcggcggcggcgtggtgcagcccggcgagagcctgagactgagctgcgccgtgagcggcttcagcctgaccaactacggcgtgcactgggtgagacaggcccccggcaagggcctggagtgggtgggcgtgatctggagcggcggcaacaccgactacaacacccccttcaccagcagattcaccatcagcaaggacaacagcaagaacaccgtgtacctgcagatgaacagcctgagagccgaggacaccgccgtgtactactgcgccagagccctgacctactacgactacgagttcgcctactggggccagggcaccctggtgaccgtgagcagcgccagcaccggcggcggcggcagcggcggcggcggcagcggcggcggcggcagcggcggcggcggcagcgacatcgtgctgacccagagccccagcagcctgagcgtgacccccggcgagaaggtgaccttcacctgcagagccagccagagcatcggcaccaacatccactggtaccagcagaagcccggccagagccccaagctgctgatcaagtacgccagcgagagcatcagcggcgtgcccagcagattcagcggcagcggcagcggcaccgacttcaccctgaccatcaacagcgtggaggccgaggacgaggccacctactactgccagcagaacaacaactggcccaccaccttcggccagggcaccaagctggagatcaagagaacc

SEQ ID NO: 275 - protein, 251 aa, Artificial Sequence
  Description of Artificial Sequence: Synthetic polypeptide
QVQLVESGGGVVQPGESLRLSCAVSGFSLTNYGVHWVRQAPGKGLEWVGVIWSGGNTDYNTPFTSRFTISKDNSKNTVYLQMNSLRAEDTAVYYCARALTYYDYEFAYWGQGTLVTVSSASTGGGGSGGGGSGGGGSGGGGSDIVLTQSPSSLSVTPGEKVTFTCRASQSIGTNIHWYQQKPGQSPKLLIKYASESISGVPSRFSGSGSGTDFTLTINSVEAEDEATYYCQQNNNWPTTFGQGTKLEIKRT

SEQ ID NO: 276 - DNA, 753 bp, Artificial Sequence
  Description of Artificial Sequence: Synthetic polynucleotide
caggtgcagctggtggagagcggcggcggcgtggtgcagcccggcgagagcctgagaatcagctgcgccgtgagcggcttcagcctgaccaactacggcgtgcactgggtgagacaggcccccggcaagggcctggagtggctgggcgtgatctggagcggcggcaacaccgactacaacacccccttcaccagcagactgaccatcagcaaggacaacagcaagagcaccgtgtacttccagatgaacagcctgagagccgaggacaccgccgtgtactactgcgccagagccctgacctactacgactacgagttcgcctactggggccagggcaccctggtgaccgtgagcagcgccagcaccggcggcggcggcagcggcggcggcggcagcggcggcggcggcagcggcggcggcggcagcgacatcgtgctgacccagagccccgacttccagagcgtgacccccggcgagaaggtgaccatcacctgcagagccagccagagcatcggcaccaacatccactggtaccagcagaagcccgaccagagccccaagctgctgatcaagtacgccagcgagagcatcagcggcgtgcccagcagattcagcggcagcggcagcggcaccgacttcaccctgaccatcaacagcctggaggccgaggacgaggccacctactactgccagcagaacaacaactggcccaccaccttcggccagggcaccaaggtggagatcaagagaacc

SEQ ID NO: 277 - protein, 251 aa, Artificial Sequence
  Description of Artificial Sequence: Synthetic polypeptide
QVQLVESGGGVVQPGESLRISCAVSGFSLTNYGVHWVRQAPGKGLEWLGVIWSGGNTDYNTPFTSRLTISKDNSKSTVYFQMNSLRAEDTAVYYCARALTYYDYEFAYWGQGTLVTVSSASTGGGGSGGGGSGGGGSGGGGSDIVLTQSPDFQSVTPGEKVTITCRASQSIGTNIHWYQQKPDQSPKLLIKYASESISGVPSRFSGSGSGTDFTLTINSLEAEDEATYYCQQNNNWPTTFGQGTKVEIKRT

SEQ ID NO: 278 - DNA, 753 bp, Artificial Sequence
  Description of Artificial Sequence: Synthetic polynucleotide
caggtgcagctggtggagagcggcggcggcgtggtgcagcccggcgagagcctgagaatcagctgcgccgtgagcggcttcagcctgaccaactacggcgtgcactgggtgagacaggcccccggcaagggcctggagtggctgggcgtgatctggagcggcggcaacaccgactacaacacccccttcaccagcagactgaccatcagcaaggacaacagcaagagcaccgtgtacttccagatgaacagcctgagagccgaggacaccgccgtgtactactgcgccagagccctgacctactacgactacgagttcgcctactggggccagggcaccctggtgaccgtgagcagcgccagcaccggcggcggcggcagcggcggcggcggcagcggcggcggcggcagcggcggcggcggcagcgacatcgtgctgacccagagccccagcagcctgagcgtgacccccggcgagaaggtgaccttcacctgcagagccagccagagcatcggcaccaacatccactggtaccagcagaagcccggccagagccccaagctgctgatcaagtacgccagcgagagcatcagcggcgtgcccagcagattcagcggcagcggcagcggcaccgacttcaccctgaccatcaacagcgtggaggccgaggacgaggccacctactactgccagcagaacaacaactggcccaccaccttcggccagggcaccaagctggagatcaagagaacc

SEQ ID NO: 279 - protein, 251 aa, Artificial Sequence
  Description of Artificial Sequence: Synthetic polypeptide
QVQLVESGGGVVQPGESLRISCAVSGFSLTNYGVHWVRQAPGKGLEWLGVIWSGGNTDYNTPFTSRLTISKDNSKSTVYFQMNSLRAEDTAVYYCARALTYYDYEFAYWGQGTLVTVSSASTGGGGSGGGGSGGGGSGGGGSDIVLTQSPSSLSVTPGEKVTFTCRASQSIGTNIHWYQQKPGQSPKLLIKYASESISGVPSRFSGSGSGTDFTLTINSVEAEDEATYYCQQNNNWPTTFGQGTKLEIKRT

SEQ ID NO: 280 - DNA, 2925 bp, Artificial Sequence
  Description of Artificial Sequence: Synthetic polynucleotide
gaggtgcaactggtagaaagcggaggtggtcttgtacagcccggtggttcactcagactgtcgtgcgcagcttcagggtatacgttcacctcctactggctccattgggtgcgacaggctccggggaaaggactggaatgggtcgggatgattgatccgtcgaattcggatactaggttcaatcccaacttcaaggaccggtttaccattagcgcggatacctcgaaaaacaccgcatatctccaaatgaactcgttgagagccgaggacacggcggtgtattactgcgcaagatacgggtcgtatgtgtcaccgttggactactggggccaggggacactggtaacggtcagctcagctagcacgaagggacctagcgtgttcccattggcgcccagctcgaaatccacatcgggcggaacggcagcccttgggtgcctcgtgaaagactactttcccgaaccggtgactgtgtcgtggaattcaggggcattgacttccggtgtccacacatttccagccgtgctgcagtccagcgggttgtattcgctctcgtcagtggtcacagtcccatcctcctcgctcggaacacaaacctatatctgtaatgtcaaccataaaccttcaaatacaaaagtggacaaaaaggtagaaccgaaatcatgcgataaaacacacacatgcccaccatgcccagcgcctgaacttttgggaggtccctcggtgtttttgtttcctcctaagcctaaggacaccctgatgatctcccgcactccggaagtgacgtgtgtcgtagtcgacgtcagccatgaggaccctgaggtgaaattcaactggtacgtagatggtgtggaggtgcataatgcaaaaactaagcctcgggaggaacaatatcaaagcacataccgggtcgtgtccgtgctcacggtacttcatcaggattggctcaacgggaaagaatacaaatgtaaggtgtccaacaaggctctcccggcaccgattgagaaaacgatcagcaaggccaaggggcagccccgagaaccccaagtatacacacttcccccgtccagggaggagatgaccaagaaccaggtgtcgctgtcgtgtgcggtcaaggggttttatcccagcgacatcgcggtagagtgggagtcgaacggccagcccgagaacaactacaagacaacaccgcctgtattggactcggacgggtcgtttttcctggtcagcaagctcacagtggataaaagccgctggcagcaggggaatgtattctcctgctccgtcatgcacgaggcgcttcacaaccattacacgcaaaaatccctgtccttgtccaagtcatgcgacaagacgggaggaggagggtcaggcggaggaggaagcgggggtggagggtccggtggtggtgggagcggaggtggagggagcggtggaggtggtagcgggggaggtggatcgggagggggtgggagctgtccgccatgtccagccccggaacttctcgggggaccgtcagtctttctttttccgccgaagcccaaggacaccttgatgattagccgcacgccggaggtcacgtgcgtagtagtggatgtatcccacgaggaccccgaggtcaaattcaattggtatgtcgacggagtggaagtacacaacgcaaagacaaagccgagagaagagcagtaccaatccacttatagggtagtctcggtcttgacagtactgcaccaggactggcttaatggaaaggaatacaagtgcaaagtctcaaacaaagccctccccgcacccatcgaaaagacaatctcgaaagcgaaaggacagcccagagagcctcaagtgtataccctgcccccgtcaagagaagagatgacgaagaaccaagtgtccctctggtgtctcgtgaaaggtttttaccccagcgatattgccgtcgaatgggaaagcaatggtcagcccgaaaacaattacaagactacgcctcccgtattggattcggatggttcgttcttcttgtactcaaagcttactgtcgataagtcgcggtggcagcaaggcaatgtgtttagctgttcggtaatgcatgaggcgctccacaatcactatacacagaagagcttgtccctcagcggggagtgcggaggtggagggagcggtggtgggggatcccaggtgcagctggtggagagcggcggcggcgtggtgcagcccggcgagagcctgagactgagctgcgccgtgagcggcttcagcctgaccaactacggcgtgcactgggtgagacaggcccccggcaagggcctggagtgggtgggcgtgatctggagcggcggcaacaccgactacaacacccccttcaccagcagattcaccatcagcaaggacaacagcaagaacaccgtgtacctgcagatgaacagcctgagagccgaggacaccgccgtgtactactgcgccagagccctgacctactacgactacgagttcgcctactggggccagggcaccctggtgaccgtgagcagcgccagcaccggcggcggcggcagcggcggcggcggcagcggcggcggcggcagcggcggcggcggcagcgacatcgtgctgacccagagccccagcagcctgagcgtgacccccggcgagaaggtgaccttcacctgcagagccagccagagcatcggcaccaacatccactggtaccagcagaagcccggccagagccccaagctgctgatcaagtacgccagcgagagcatcagcggcgtgcccagcagattcagcggcagcggcagcggcaccgacttcaccctgaccatcaacagcgtggaggccgaggacgaggccacctactactgccagcagaacaacaactggcccaccaccttcggccagggcaccaagctggagatcaagagaacc

SEQ ID NO: 281 - protein, 975 aa, Artificial Sequence
  Description of Artificial Sequence: Synthetic polypeptide
EVQLVESGGGLVQPGGSLRLSCAASGYTFTSYWLHWVRQAPGKGLEWVGMIDPSNSDTRFNPNFKDRFTISADTSKNTAYLQMNSLRAEDTAVYYCARYGSYVSPLDYWGQGTLVTVSSASTKGPSVFPLAPSSKSTSGGTAALGCLVKDYFPEPVTVSWNSGALTSGVHTFPAVLQSSGLYSLSSVVTVPSSSLGTQTYICNVNHKPSNTKVDKKVEPKSCDKTHTCPPCPAPELLGGPSVFLFPPKPKDTLMISRTPEVTCVVVDVSHEDPEVKFNWYVDGVEVHNAKTKPREEQYQSTYRVVSVLTVLHQDWLNGKEYKCKVSNKALPAPIEKTISKAKGQPREPQVYTLPPSREEMTKNQVSLSCAVKGFYPSDIAVEWESNGQPENNYKTTPPVLDSDGSFFLVSKLTVDKSRWQQGNVFSCSVMHEALHNHYTQKSLSLSKSCDKTGGGGSGGGGSGGGGSGGGGSGGGGSGGGGSGGGGSGGGGSCPPCPAPELLGGPSVFLFPPKPKDTLMISRTPEVTCVVVDVSHEDPEVKFNWYVDGVEVHNAKTKPREEQYQSTYRVVSVLTVLHQDWLNGKEYKCKVSNKALPAPIEKTISKAKGQPREPQVYTLPPSREEMTKNQVSLWCLVKGFYPSDIAVEWESNGQPENNYKTTPPVLDSDGSFFLYSKLTVDKSRWQQGNVFSCSVMHEALHNHYTQKSLSLSGECGGGGSGGGGSQVQLVESGGGVVQPGESLRLSCAVSGFSLTNYGVHWVRQAPGKGLEWVGVIWSGGNTDYNTPFTSRFTISKDNSKNTVYLQMNSLRAEDTAVYYCARALTYYDYEFAYWGQGTLVTVSSASTGGGGSGGGGSGGGGSGGGGSDIVLTQSPSSLSVTPGEKVTFTCRASQSIGTNIHWYQQKPGQSPKLLIKYASESISGVPSRFSGSGSGTDFTLTINSVEAEDEATYYCQQNNNWPTTFGQGTKLEIKRT

SEQ ID NO: 282 - DNA, 2925 bp, Artificial Sequence
  Description of Artificial Sequence: Synthetic polynucleotide
gaggtgcaactggtagaaagcggaggtggtcttgtacagcccggtggttcactcagactgtcgtgcgcagcttcagggtatacgttcacctcctactggctccattgggtgcgacaggctccggggaaaggactggaatgggtcgggatgattgatccgtcgaattcggatactaggttcaatcccaacttcaaggaccggtttaccattagcgcggatacctcgaaaaacaccgcatatctccaaatgaactcgttgagagccgaggacacggcggtgtattactgcgcaagatacgggtcgtatgtgtcaccgttggactactggggccaggggacactggtaacggtcagctcagctagcacgaagggacctagcgtgttcccattggcgcccagctcgaaatccacatcgggcggaacggcagcccttgggtgcctcgtgaaagactactttcccgaaccggtgactgtgtcgtggaattcaggggcattgacttccggtgtccacacatttccagccgtgctgcagtccagcgggttgtattcgctctcgtcagtggtcacagtcccatcctcctcgctcggaacacaaacctatatctgtaatgtcaaccataaaccttcaaatacaaaagtggacaaaaaggtagaaccgaaatcatgcgataaaacacacacatgcccaccatgcccagcgcctgaacttttgggaggtccctcggtgtttttgtttcctcctaagcctaaggacaccctgatgatctcccgcactccggaagtgacgtgtgtcgtagtcgacgtcagccatgaggaccctgaggtgaaattcaactggtacgtagatggtgtggaggtgcataatgcaaaaactaagcctcgggaggaacaatatcaaagcacataccgggtcgtgtccgtgctcacggtacttcatcaggattggctcaacgggaaagaatacaaatgtaaggtgtccaacaaggctctcccggcaccgattgagaaaacgatcagcaaggccaaggggcagccccgagaaccccaagtatacacacttcccccgtccagggaggagatgaccaagaaccaggtgtcgctgtcgtgtgcggtcaaggggttttatcccagcgacatcgcggtagagtgggagtcgaacggccagcccgagaacaactacaagacaacaccgcctgtattggactcggacgggtcgtttttcctggtcagcaagctcacagtggataaaagccgctggcagcaggggaatgtattctcctgctccgtcatgcacgaggcgcttcacaaccattacacgcaaaaatccctgtccttgtccaagtcatgcgacaagacgggaggaggagggtcaggcggaggaggaagcgggggtggagggtccggtggtggtgggagcggaggtggagggagcggtggaggtggtagcgggggaggtggatcgggagggggtgggagctgtccgccatgtccagccccggaacttctcgggggaccgtcagtctttctttttccgccgaagcccaaggacaccttgatgattagccgcacgccggaggtcacgtgcgtagtagtggatgtatcccacgaggaccccgaggtcaaattcaattggtatgtcgacggagtggaagtacacaacgcaaagacaaagccgagagaagagcagtaccaatccacttatagggtagtctcggtcttgacagtactgcaccaggactggcttaatggaaaggaatacaagtgcaaagtctcaaacaaagccctccccgcacccatcgaaaagacaatctcgaaagcgaaaggacagcccagagagcctcaagtgtataccctgcccccgtcaagagaagagatgacgaagaaccaagtgtccctctggtgtctcgtgaaaggtttttaccccagcgatattgccgtcgaatgggaaagcaatggtcagcccgaaaacaattacaagactacgcctcccgtattggattcggatggttcgttcttcttgtactcaaagcttactgtcgataagtcgcggtggcagcaaggcaatgtgtttagctgttcggtaatgcatgaggcgctccacaatcactatacacagaagagcttgtccctcagcggggagtgcggaggtggagggagcggtggtgggggatcccaggtgcagctggtggagagcggcggcggcgtggtgcagcccggcgagagcctgagaatcagctgcgccgtgagcggcttcagcctgaccaactacggcgtgcactgggtgagacaggcccccggcaagggcctggagtggctgggcgtgatctggagcggcggcaacaccgactacaacacccccttcaccagcagactgaccatcagcaaggacaacagcaagagcaccgtgtacttccagatgaacagcctgagagccgaggacaccgccgtgtactactgcgccagagccctgacctactacgactacgagttcgcctactggggccagggcaccctggtgaccgtgagcagcgccagcaccggcggcggcggcagcggcggcggcggcagcggcggcggcggcagcggcggcggcggcagcgacatcgtgctgacccagagccccgacttccagagcgtgacccccggcgagaaggtgaccatcacctgcagagccagccagagcatcggcaccaacatccactggtaccagcagaagcccgaccagagccccaagctgctgatcaagtacgccagcgagagcatcagcggcgtgcccagcagattcagcggcagcggcagcggcaccgacttcaccctgaccatcaacagcctggaggccgaggacgaggccacctactactgccagcagaacaacaactggcccaccaccttcggccagggcaccaaggtggagatcaagagaacc

SEQ ID NO: 283 - protein, 975 aa, Artificial Sequence [sequence omitted]

SEQ ID NO: 284 - DNA, 2925 bp, Artificial Sequence
  Description of Artificial Sequence: Synthetic polynucleotide
gaggtgcaactggtagaaagcggaggtggtcttgtacagcccggtggttcactcagactgtcgtgcgcagcttcagggtatacgttcacctcctactggctccattgggtgcgacaggctccggggaaaggactggaatgggtcgggatgattgatccgtcgaattcggatactaggttcaatcccaacttcaaggaccggtttaccattagcgcggatacctcgaaaaacaccgcatatctccaaatgaactcgttgagagccgaggacacggcggtgtattactgcgcaagatacgggtcgtatgtgtcaccgttggactactggggccaggggacactggtaacggtcagctcagctagcacgaagggacctagcgtgttcccattggcgcccagctcgaaatccacatcgggcggaacggcagcccttgggtgcctcgtgaaagactactttcccgaaccggtgactgtgtcgtggaattcaggggcattgacttccggtgtccacacatttccagccgtgctgcagtccagcgggttgtattcgctctcgtcagtggtcacagtcccatcctcctcgctcggaacacaaacctatatctgtaatgtcaaccataaaccttcaaatacaaaagtggacaaaaaggtagaaccgaaatcatgcgataaaacacacacatgcccaccatgcccagcgcctgaacttttgggaggtccctcggtgtttttgtttcctcctaagcctaaggacaccctgatgatctcccgcactccggaagtgacgtgtgtcgtagtcgacgtcagccatgaggaccctgaggtgaaattcaactggtacgtagatggtgtggaggtgcataatgcaaaaactaagcctcgggaggaacaatatcaaagcacataccgggtcgtgtccgtgctcacggtacttcatcaggattggctcaacgggaaagaatacaaatgtaaggtgtccaacaaggctctcccggcaccgattgagaaaacgatcagcaaggccaaggggcagccccgagaaccccaagtatacacacttcccccgtccagggaggagatgaccaagaaccaggtgtcgctgtcgtgtgcggtcaaggggttttatcccagcgacatcgcggtagagtgggagtcgaacggccagcccgagaacaactacaagacaacaccgcctgtattggactcggacgggtcgtttttcctggtcagcaagctcacagtggataaaagccgctggcagcaggggaatgtattctcctgctccgtcatgcacgaggcgcttcacaaccattacacgcaaaaatccctgtccttgtccaagtcatgcgacaagacgggaggaggagggtcaggcggaggaggaagcgggggtggagggtccggtggtggtgggagcggaggtggagggagcggtggaggtggtagcgggggaggtggatcgggagggggtgggagctgtccgccatgtccagccccggaacttctcgggggaccgtcagtctttctttttccgccgaagcccaaggacaccttgatgattagccgcacgccggaggtcacgtgcgtagtagtggatgtatcccacgaggaccccgaggtcaaattcaattggtatgtcgacggagtggaagtacacaacgcaaagacaaagccgagagaagagcagtaccaatccacttatagggtagtctcggtcttgacagtactgcaccaggactggcttaatggaaaggaatacaagtgcaaagtctcaaacaaagccctccccgcacccatcgaaaagacaatctcgaaagcgaaaggacagcccagagagcctcaagtgtataccctgcccccgtcaagagaagagatgacgaagaaccaagtgtccctctggtgtctcgtgaaaggtttttaccccagcgatattgccgtcgaatgggaaagcaatggtcagcccgaaaacaattacaagactacgcctcccgtattggattcggatggttcgttcttcttgtactcaaagcttactgtcgataagtcgcggtggcagcaaggcaatgtgtttagctgttcggtaatgcatgaggcgctccacaatcactatacacagaagagcttgtccctcagcggggagtgcggaggtggagggagcggtggtgggggatcccaggtgcagctggtggagagcggcggcggcgtggtgcagcccggcgagagcctgagaatcagctgcgccgtgagcggcttcagcctgaccaactacggcgtgcactgggtgagacaggcccccggcaagggcctggagtggctgggcgtgatctggagcggcggcaacaccgactacaacacccccttcaccagcagactgaccatcagcaaggacaacagcaagagcaccgtgtacttccagatgaacagcctgagagccgaggacaccgccgtgtactactgcgccagagccctgacctactacgactacgagttcgcctactggggccagggcaccctggtgaccgtgagcagcgccagcaccggcggcggcggcagcggcggcggcggcagcggcggcggcggcagcggcggcggcggcagcgacatcgtgctgacccagagccccagcagcctgagcgtgacccccggcgagaaggtgaccttcacctgcagagccagccagagcatcggcaccaacatccactggtaccagcagaagcccggccagagccccaagctgctgatcaagtacgccagcgagagcatcagcggcgtgcccagcagattcagcggcagcggcagcggcaccgacttcaccctgaccatcaacagcgtggaggccgaggacgaggccacctactactgccagcagaacaacaactggcccaccaccttcggccagggcaccaagctggagatcaagagaacc

SEQ ID NO: 285 - protein, 975 aa, Artificial Sequence [sequence omitted]

SEQ ID NO: 286 - DNA, 648 bp, Artificial Sequence
  Description of Artificial Sequence: Synthetic polynucleotide
caggtacaacttgtgcagtcaggagcggaggtgaagaagcctggtgcatcggtcaaagtgtcatgcaaagcctcggggtacatctttactgcgtacacaatgcactgggtcagacaggctccgggacaaggtctggaatggatggggtggatcaagcccaataacgggctcgcgaattacgcccagaaattccaggggagagtgactatgacaagggatacgagcatttcgacggcgtatatggagctctcgcgcctgcggtcagatgacacagccgtatactattgcgcgcgatcggaaatcaccaccgaattcgactattggggtcagggaactcttgtcacggtatccagcgctagcaccaagggcccgtcagtattcccgcttgcaccctcgtcgaaatcaacatcgggcggaacagcagcccttggctgcttggtaaaagactacttcccagagccagtaacggtatcgtggaattccggagctcttacgtcgggggtccatacatttcccgcggtactccaatcgtcgggactgtactcattgtcgtcagtcgtgaccgtgccatccagctccttgggaacccagacttacatctgcaacgtcaaccacaagccctcgaacactaaagtggacaagaaagtg

SEQ ID NO: 287 - protein, 216 aa, Artificial Sequence
  Description of Artificial Sequence: Synthetic polypeptide
QVQLVQSGAEVKKPGASVKVSCKASGYIFTAYTMHWVRQAPGQGLEWMGWIKPNNGLANYAQKFQGRVTMTRDTSISTAYMELSRLRSDDTAVYYCARSEITTEFDYWGQGTLVTVSSASTKGPSVFPLAPSSKSTSGGTAALGCLVKDYFPEPVTVSWNSGALTSGVHTFPAVLQSSGLYSLSSVVTVPSSSLGTQTYICNVNHKPSNTKVDKKV

SEQ ID NO: 288 - DNA, 654 bp, Artificial Sequence
  Description of Artificial Sequence: Synthetic polynucleotide
gacatcgtgctgacccagtcaccggattcgcttgcagtctcactgggagagagagccacgatcaattgcaagtcctcggaatcagtggacagctacgctaactcattcatgcactggtatcagcagaagcctggccagccgcccaagttgctgatctaccgcgcaagcacacgggagtcgggggtgccagataggttttccggatcgggttcccgaacggacttcacactcacgatttcatccttgcaagccgaagatgtggcggtctattactgtcaacagtcgaaagaggatccccttacttttggtgggggtactaaagtagagattaagcgtacggtggcagcgccgtcagtctttatcttccctccttcggatgagcagcttaagagcgggacagcctcagtagtctgccttctcaacaacttttacccgagagaggccaaggtgcagtggaaggtggataatgccttgcagtcagggaactcacaagaatcggtcacagaacaggactccaaagatagcacttattccctgtcaagcacgctcactttgtccaaagcggactacgagaagcacaaagtgtacgcttgcgaggtgactcatcaaggattgtcgagccccgtaacgaagagcttcaatcggggcgagtgt

SEQ ID NO: 289 - protein, 218 aa, Artificial Sequence
  Description of Artificial Sequence: Synthetic polypeptide
DIVLTQSPDSLAVSLGERATINCKSSESVDSYANSFMHWYQQKPGQPPKLLIYRASTRESGVPDRFSGSGSRTDFTLTISSLQAEDVAVYYCQQSKEDPLTFGGGTKVEIKRTVAAPSVFIFPPSDEQLKSGTASVVCLLNNFYPREAKVQWKVDNALQSGNSQESVTEQDSKDSTYSLSSTLTLSKADYEKHKVYACEVTHQGLSSPVTKSFNRGEC

SEQ ID NO: 290 - DNA, 2922 bp, Artificial Sequence
  Description of Artificial Sequence: Synthetic polynucleotide
caggtacaacttgtgcagtcaggagcggaggtgaagaagcctggtgcatcggtcaaagtgtcatgcaaagcctcggggtacatctttactgcgtacacaatgcactgggtcagacaggctccgggacaaggtctggaatggatggggtggatcaagcccaataacgggctcgcgaattacgcccagaaattccaggggagagtgactatgacaagggatacgagcatttcgacggcgtatatggagctctcgcgcctgcggtcagatgacacagccgtatactattgcgcgcgatcggaaatcaccaccgaattcgactattggggtcagggaactcttgtcacggtatccagcgctagcaccaagggcccgtcagtattcccgcttgcaccctcgtcgaaatcaacatcgggcggaacagcagcccttggctgcttggtaaaagactacttcccagagccagtaacggtatcgtggaattccggagctcttacgtcgggggtccatacatttcccgcggtactccaatcgtcgggactgtactcattgtcgtcagtcgtgaccgtgccatccagctccttgggaacccagacttacatctgcaacgtcaaccacaagccctcgaacactaaagtggacaagaaagtggaaccgaaatcatgcgataaaacacacacatgcccaccatgcccagcgcctgaacttttgggaggtccctcggtgtttttgtttcctcctaagcctaaggacaccctgatgatctcccgcactccggaagtgacgtgtgtcgtagtcgacgtcagccatgaggaccctgaggtgaaattcaactggtacgtagatggtgtggaggtgcataatgcaaaaactaagcctcgggaggaacaatatcaaagcacataccgggtcgtgtccgtgctcacggtacttcatcaggattggctcaacgggaaagaatacaaatgtaaggtgtccaacaaggctctcccggcaccgattgagaaaacgatcagcaaggccaaggggcagccccgagaaccccaagtatacacacttcccccgtccagggaggagatgaccaagaaccaggtgtcgctgtcgtgtgcggtcaaggggttttatcccagcgacatcgcggtagagtgggagtcgaacggccagcccgagaacaactacaagacaacaccgcctgtattggactcggacgggtcgtttttcctggtcagcaagctcacagtggataaaagccgctggcagcaggggaatgtattctcctgctccgtcatgcacgaggcgcttcacaaccattacacgcaaaaatccctgtccttgtccaagtcatgcgacaagacgggaggaggagggtcaggcggaggaggaagcgggggtggagggtccggtggtggtgggagcggaggtggagggagcggtggaggtggtagcgggggaggtggatcgggagggggtgggagctgtccgccatgtccagccccggaacttctcgggggaccgtcagtctttctttttccgccgaagcccaaggacaccttgatgattagccgcacgccggaggtcacgtgcgtagtagtggatgtatcccacgaggaccccgaggtcaaattcaattggtatgtcgacggagtggaagtacacaacgcaaagacaaagccgagagaagagcagtaccaatccacttatagggtagtctcggtcttgacagtactgcaccaggactggcttaatggaaaggaatacaagtgcaaagtctcaaacaaagccctccccgcacccatcgaaaagacaatctcgaaagcgaaaggacagcccagagagcctcaagtgtataccctgcccccgtcaagagaagagatgacgaagaaccaagtgtccctctggtgtctcgtgaaaggtttttaccccagcgatattgccgtcgaatgggaaagcaatggtcagcccgaaaacaattacaagactacgcctcccgtattggattcggatggttcgttcttcttgtactcaaagcttactgtcgataagtcgcggtggcagcaaggcaatgtgtttagctgttcggtaatgcatgaggcgctccacaatcactatacacagaagagcttgtccctcagcggggagtgcggaggtggagggagcggtggtgggggatcccaggtgcagctggtggagagcggcggcggcgtggtgcagcccggcgagagcctgagactgagctgcgccgtgagcggcttcagcctgaccaactacggcgtgcactgggtgagacaggcccccggcaagggcctggagtgggtgggcgtgatctggagcggcggcaacaccgactacaacacccccttcaccagcagattcaccatcagcaaggacaacagcaagaacaccgtgtacctgcagatgaacagcctgagagccgaggacaccgccgtgtactactgcgccagagccctgacctactacgactacgagttcgcctactggggccagggcaccctggtgaccgtgagcagcgccagcaccggcggcggcggcagcggcggcggcggcagcggcggcggcggcagcggcggcggcggcagcgacatcgtgctgacccagagccccgacttccagagcgtgacccccggcgagaaggtgaccatcacctgcagagccagccagagcatcggcaccaacatccactggtaccagcagaagcccgaccagagccccaagctgctgatcaagtacgccagcgagagcatcagcggcgtgcccagcagattcagcggcagcggcagcggcaccgacttcaccctgaccatcaacagcctggaggccgaggacgaggccacctactactgccagcagaacaacaactggcccaccaccttcggccagggcaccaaggtggagatcaagagaacc

SEQ ID NO: 291 - protein, 974 aa, Artificial Sequence
  Description of Artificial Sequence: Synthetic polypeptide
QVQLVQSGAEVKKPGASVKVSCKASGYIFTAYTMHWVRQAPGQGLEWMGWIKPNNGLANYAQKFQGRVTMTRDTSISTAYMELSRLRSDDTAVYYCARSEITTEFDYWGQGTLVTVSSASTKGPSVFPLAPSSKSTSGGTAALGCLVKDYFPEPVTVSWNSGALTSGVHTFPAVLQSSGLYSLSSVVTVPSSSLGTQTYICNVNHKPSNTKVDKKVEPKSCDKTHTCPPCPAPELLGGPSVFLFPPKPKDTLMISRTPEVTCVVVDVSHEDPEVKFNWYVDGVEVHNAKTKPREEQYQSTYRVVSVLTVLHQDWLNGKEYKCKVSNKALPAPIEKTISKAKGQPREPQVYTLPPSREEMTKNQVSLSCAVKGFYPSDIAVEWESNGQPENNYKTTPPVLDSDGSFFLVSKLTVDKSRWQQGNVFSCSVMHEALHNHYTQKSLSLSKSCDKTGGGGSGGGGSGGGGSGGGGSGGGGSGGGGSGGGGSGGGGSCPPCPAPELLGGPSVFLFPPKPKDTLMISRTPEVTCVVVDVSHEDPEVKFNWYVDGVEVHNAKTKPREEQYQSTYRVVSVLTVLHQDWLNGKEYKCKVSNKALPAPIEKTISKAKGQPREPQVYTLPPSREEMTKNQVSLWCLVKGFYPSDIAVEWESNGQPENNYKTTPPVLDSDGSFFLYSKLTVDKSRWQQGNVFSCSVMHEALHNHYTQKSLSLSGECGGGGSGGGGSQVQLVESGGGVVQPGESLRLSCAVSGFSLTNYGVHWVRQAPGKGLEWVGVIWSGGNTDYNTPFTSRFTISKDNSKNTVYLQMNSLRAEDTAVYYCARALTYYDYEFAYWGQGTLVTVSSASTGGGGSGGGGSGGGGSGGGGSDIVLTQSPDFQSVTPGEKVTITCRASQSIGTNIHWYQQKPDQSPKLLIKYASESISGVPSRFSGSGSGTDFTLTINSLEAEDEATYYCQQNNNWPTTFGQGTKVEIKRT

SEQ ID NO: 292 - DNA, 1530 bp, Artificial Sequence
  Description of Artificial Sequence: Synthetic polynucleotide
atgggcttcggactgtcgtggctttttctggtggcgattcttaagggggtccagtgcgataagacccacacatgccctccctgtccagcacccgagctgctcgggggaccctcggtgttcttgtttcctcccaaacccaaagatacccttatgattagccggacaccagaggtgacgtgcgtggtagtagacgtgtcccatgaggacccggaggtcaagttcaactggtacgtggacggagtggaggtgcacaatgcaaagaccaagccgagggaagagcaataccagtccacatatagagtcgtgtcggtccttacggtcttgcatcaggactggctgaatggcaaagaatacaaatgtaaagtctccaacaaagctctcccagcgcccattgagaaaacaatctcaaaagcgaaaggccaaccgagagaacctcaagtctatactcttcccccgtcgagagaggaaatgaccaaaaaccaggtatccctgtcatgcgcggtcaaggggttttacccaagcgacatcgccgtggagtgggagtcgaacggacagccagagaataactataagacgacccctcccgtgctggattcggatggatcgttctttcttgtcagcaaactcacagtcgacaaatcaaggtggcagcaagggaacgtgttcagctgttcggtaatgcatgaagccctccacaatcactacacgcagaaatccctgtcgctctcaccagggaagggtgggggtggctcagggggtgggggatcaggtggtggtggtagcggaggtggagggagcggaggcggaggctccggtggaggaggttccggaggtggcgggtcagggggaggagggtcatgtccgccgtgccctgcccccgaattgctgggaggtccgtccgtatttctgtttcccccgaagcctaaagatactcttatgatctcgcgaacgccggaagtaacttgtgtcgtggtagatgtctcacacgaagatcccgaagtgaaattcaattggtatgtcgacggcgtggaggtacataacgccaagacgaagcctagagaggaacagtaccagtcaacgtatcgggtcgtatccgtgctcaccgtgctccaccaggattggctgaacggaaaggagtacaagtgcaaagtctcgaacaaggcgttgcctgcgccaatcgaaaagacgatctccaaagctaagggacaaccaagggaaccacaagtgtatactctcccgccctcgcgcgaagagatgacaaagaatcaggtgtcactttggtgcttggtgaaggggttctatccctcggatattgcggtcgagtgggagagcaatggtcaaccggagaacaattacaagacgacaccgcccgtattggactccgacgggtccttctttctctactcgaagctcactgtagataagtcgcgatggcagcaggggaacgtctttagctgttccgtgatgcacgaggcacttcataaccactatacccagaagtcgttgtcgctttcccccggaaaatgataa

SEQ ID NO: 293 - protein, 508 aa, Artificial Sequence
  Description of Artificial Sequence: Synthetic polypeptide
MGFGLSWLFLVAILKGVQCDKTHTCPPCPAPELLGGPSVFLFPPKPKDTLMISRTPEVTCVVVDVSHEDPEVKFNWYVDGVEVHNAKTKPREEQYQSTYRVVSVLTVLHQDWLNGKEYKCKVSNKALPAPIEKTISKAKGQPREPQVYTLPPSREEMTKNQVSLSCAVKGFYPSDIAVEWESNGQPENNYKTTPPVLDSDGSFFLVSKLTVDKSRWQQGNVFSCSVMHEALHNHYTQKSLSLSPGKGGGGSGGGGSGGGGSGGGGSGGGGSGGGGSGGGGSGGGGSCPPCPAPELLGGPSVFLFPPKPKDTLMISRTPEVTCVVVDVSHEDPEVKFNWYVDGVEVHNAKTKPREEQYQSTYRVVSVLTVLHQDWLNGKEYKCKVSNKALPAPIEKTISKAKGQPREPQVYTLPPSREEMTKNQVSLWCLVKGFYPSDIAVEWESNGQPENNYKTTPPVLDSDGSFFLYSKLTVDKSRWQQGNVFSCSVMHEALHNHYTQKSLSLSPGK

SEQ ID NO: 294 - DNA, 1530 bp, Artificial Sequence
  Description of Artificial Sequence: Synthetic polynucleotide
atgggcttcggactgtcgtggctttttctggtggcgattcttaagggggtccagtgcgataaaactcacacgtgccctccatgccctgctccggaacttctcgggggaccgtccgtattcctctttcctcctaagcctaaggacaccctcatgatcagcaggacccccgaggtgacgtgtgtagtcgtggatgtgtcccacgaggacccggaagtcaagttcaactggtatgtagatggagtggaggtccataatgccaagaccaagccaagagaggagcagtatcagtcgacttatcgggtggtcagcgtcctcacggtacttcatcaggattggctgaatggaaaggagtacaaatgtaaggtatccaacaaagcgttgccagcgcccatcgaaaagacaatctcgaaggcgaagggacaaccccgggaaccgcaagtgtgtaccctgccaccttcccgggaggagatgacgaaaaaccaggtatccctgtcgtgcgccgtgaaagggttttacccatcggatatcgcagtggagtgggaaagcaatgggcagccggaaaacaactataagaccacgccccctgtactcgactcggatgggtcctttttcctcgtcagcaaacttacggtagacaaaagcaggtggcaacaggggaatgtgttcagctgctcagtcatgcacgaggcactccataaccattacactcagaaatcactgtcgctgtcgcccggtaaagggggaggtgggtcgggcggtgggggaagcggtggtgggggatcaggtgggggaggttcgggaggtggtgggagcggtggaggcggttccggaggaggcgggtcgggtggaggtggatcgtgcccaccgtgccccgcaccggaactccttgggggaccatccgtgtttctgtttccaccgaagccaaaggacactctcatgatctcgcgcacaccagaggtgacatgtgtcgtcgtcgatgtgtcacacgaagatccagaggtcaagtttaactggtacgtggacggagtcgaggtccacaatgcgaaaacgaaacccagagaagagcagtaccagtcaacataccgggtggtgagcgtattgaccgtgcttcaccaggactggcttaacgggaaagagtacaagtgtaaggtcagcaataaggcgctcccagcgcctattgagaaaactatctcgaaagcaaaggggcagccacgagagccccaagtgtgtacgctgccaccctgtcgggaggaaatgaccaagaatcaagtctcgctttggtgccttgtgaagggattctatcccagcgacattgctgtagagtgggagtcgaacgggcaacccgagaataactacaagactactccgccggtgttggactcggacgggtcgttcttcctttatagcaaactcacagtcgacaagtccagatggcagcagggaaatgtcttttcctgctcggtaatgcacgaagcgttgcataaccactatacacagaagtcgctttcgttgtcacccgggaaatgataa

SEQ ID NO: 295 - protein, 508 aa, Artificial Sequence
  Description of Artificial Sequence: Synthetic polypeptide
MGFGLSWLFLVAILKGVQCDKTHTCPPCPAPELLGGPSVFLFPPKPKDTLMISRTPEVTCVVVDVSHEDPEVKFNWYVDGVEVHNAKTKPREEQYQSTYRVVSVLTVLHQDWLNGKEYKCKVSNKALPAPIEKTISKAKGQPREPQVCTLPPSREEMTKNQVSLSCAVKGFYPSDIAVEWESNGQPENNYKTTPPVLDSDGSFFLVSKLTVDKSRWQQGNVFSCSVMHEALHNHYTQKSLSLSPGKGGGGSGGGGSGGGGSGGGGSGGGGSGGGGSGGGGSGGGGSCPPCPAPELLGGPSVFLFPPKPKDTLMISRTPEVTCVVVDVSHEDPEVKFNWYVDGVEVHNAKTKPREEQYQSTYRVVSVLTVLHQDWLNGKEYKCKVSNKALPAPIEKTISKAKGQPREPQVCTLPPCREEMTKNQVSLWCLVKGFYPSDIAVEWESNGQPENNYKTTPPVLDSDGSFFLYSKLTVDKSRWQQGNVFSCSVMHEALHNHYTQKSLSLSPGK

SEQ ID NO: 296 - DNA, 1530 bp, Artificial Sequence
  Description of Artificial Sequence: Synthetic polynucleotide
atgggcttcggactgtcgtggctttttctggtggcgattcttaagggggtccagtgcgacaaaacgcacacttgtccgccgtgccctgccccagagttgcttggaggaccatcagtatttctcttccctcctaagccgaaagacacactcatgatctcacgcacaccggaagtaacttgcgtggtggtggatgtgtcgcatgaagatcccgaggtcaaattcaactggtacgtcgacggtgtggaggtgcacaacgccaagacgaaacccagagaagagcagtatcagtcgacctaccgagtggtatccgtgcttacggtgctgcatcaggattggttgaatggaaaagaatacaaatgcaaagtctcgaataaggcgctcccagccccaatcgaaaagacgatttccaaggcgaaggggcagcctcgggaacctcaggtctatacccttcctccgtcacgcgaggaaatgacaaagaatcaggtcagcctcacatgcctcgtgaagggattctatccgtcggatattgctgtcgagtgggaatcgaacggacagcccgagaacaattacaaaacaactcctcccgtacttgactcggacgggagctttttccttacgtcaaagctgaccgtcgataaaagcaggtggcagcaagggaatgtgttttcgtgctcggtcatgcacgaagcacttcataaccactacacccagaaatccttgagcctgtcaccggggaagggaggagggggtagcggcggtggagggagcggaggaggcgggtccggtgggggtgggtccgggggtggcggaagcggtggcggaggttcgggagggggaggaagcggagggggtggatcgtgtcctccgtgcccagcccccgaactcctcgggggaccctcggtattcctttttccgccgaaacccaaggacactttgatgattagccggacgcccgaggtgacatgcgtggtcgtggatgtatcgcatgaggaccccgaagtgaagttcaattggtacgtggatggggtggaagtccataacgcaaagaccaagcccagagaggagcagtaccaatcgacgtatagggtcgtgtccgtcctcacagtcttgcaccaggactggttgaacgggaaggagtataagtgtaaggtcagcaacaaagcgttgcctgcgcccattgaaaagactatctcaaaagcaaagggacagcccagggagccccaagtgtacacactgcccccgtcaagagaagaaatgaccaaaaatcaagtgtccctctactgcttggtgaaggggttctatcccagcgacatcgcggtagagtgggagtcaaatggccagcccgaaaacaactacaaaacgacaccgcccgtgttggattcggatgggtcattctttctgtattcaaaactgacagtggacaagtcgcggtggcaacaggggaacgtgttttcctgttccgtaatgcacgaggcgttgcacaatcactatacgcagaagtccctctcgctttcacccgggaagtgataa

SEQ ID NO: 297 - protein, 508 aa, Artificial Sequence
  Description of Artificial Sequence: Synthetic polypeptide
MGFGLSWLFLVAILKGVQCDKTHTCPPCPAPELLGGPSVFLFPPKPKDTLMISRTPEVTCVVVDVSHEDPEVKFNWYVDGVEVHNAKTKPREEQYQSTYRVVSVLTVLHQDWLNGKEYKCKVSNKALPAPIEKTISKAKGQPREPQVYTLPPSREEMTKNQVSLTCLVKGFYPSDIAVEWESNGQPENNYKTTPPVLDSDGSFFLTSKLTVDKSRWQQGNVFSCSVMHEALHNHYTQKSLSLSPGKGGGGSGGGGSGGGGSGGGGSGGGGSGGGGSGGGGSGGGGSCPPCPAPELLGGPSVFLFPPKPKDTLMISRTPEVTCVVVDVSHEDPEVKFNWYVDGVEVHNAKTKPREEQYQSTYRVVSVLTVLHQDWLNGKEYKCKVSNKALPAPIEKTISKAKGQPREPQVYTLPPSREEMTKNQVSLYCLVKGFYPSDIAVEWESNGQPENNYKTTPPVLDSDGSFFLYSKLTVDKSRWQQGNVFSCSVMHEALHNHYTQKSLSLSPGK

SEQ ID NO: 298 - DNA, 1530 bp, Artificial Sequence
  Description of Artificial Sequence: Synthetic polynucleotide
atgggcttcggactgtcgtggctttttctggtggcgattcttaagggggtccagtgcgataagacttgctgctgtcctccctgtccagcacccgagctgctcgggggaccctcggtgttcttgtttcctcccaaacccaaagatacccttatgattagccggacaccagaggtgacgtgcgtggtagtagacgtgtcccatgaggacccggaggtcaagttcaactggtacgtggacggagtggaggtgcacaatgcaaagaccaagccgagggaagagcaataccagtccacatatagagtcgtgtcggtccttacggtcttgcatcaggactggctgaatggcaaagaatacaaatgtaaagtctccaacaaagctctcccagcgcccattgagaaaacaatctcaaaagcgaaaggccaaccgagagaacctcaagtctatactcttcccccgtcgagagaggaaatgaccaaaaatcaggtatccctgtcatgcgcggtcaaggggttttacccaagcgacatcgccgtggagtgggagtcgaacggacagccagagaataactataagacgacccctcccgtgctggattcggatggatcgttctttcttgtcagcaaactcacagtcgacaaatcaaggtggcagcaagggaacgtgttcagctgttcggtaatgcatgaagccctccacaatcactacacgcagaaatccctgtcgctctcaccagggaagggtgggggtggctcagggggtgggggatcaggtggtggtggtagcggaggtggagggagcggaggcggaggctccggtggaggaggttccggaggtggcgggtcagggggaggagggtcatgtccgccgtgccctgcccccgaattgctgggaggtccgtccgtatttctgtttcccccgaagcctaaagatactcttatgatctcgcgaacgccggaagtaacttgtgtcgtggtagatgtctcacacgaagatcccgaagtgaaattcaattggtatgtcgacggcgtggaggtacataacgccaagacgaagcctagagaggaacagtaccagtcaacgtatcgggtcgtatccgtgctcaccgtgctccaccaggattggctgaacggaaaggagtacaagtgcaaagtctcgaacaaggcgttgcctgcgccaatcgaaaagacgatctccaaagctaagggacaaccaagggaaccacaagtgtatactctcccgccctcgcgcgaagagatgacaaagaatcaggtgtcactttggtgcttggtgaaggggttctatccctcggatattgcggtcgagtgggagagcaatggtcaaccggagaacaattacaagacgacaccgcccgtattggactccgacgggtccttctttctctactcgaagctcactgtagataagtcgcgatggcagcaggggaacgtctttagctgttccgtgatgcacgaggcacttcataaccactatacccagaagtcgttgtcgctttcccccggaaaatgataa

SEQ ID NO: 299 - protein, 508 aa, Artificial Sequence
  Description of Artificial Sequence: Synthetic polypeptide
MGFGLSWLFLVAILKGVQCDKTCCCPPCPAPELLGGPSVFLFPPKPKDTLMISRTPEVTCVVVDVSHEDPEVKFNWYVDGVEVHNAKTKPREEQYQSTYRVVSVLTVLHQDWLNGKEYKCKVSNKALPAPIEKTISKAKGQPREPQVYTLPPSREEMTKNQVSLSCAVKGFYPSDIAVEWESNGQPENNYKTTPPVLDSDGSFFLVSKLTVDKSRWQQGNVFSCSVMHEALHNHYTQKSLSLSPGKGGGGSGGGGSGGGGSGGGGSGGGGSGGGGSGGGGSGGGGSCPPCPAPELLGGPSVFLFPPKPKDTLMISRTPEVTCVVVDVSHEDPEVKFNWYVDGVEVHNAKTKPREEQYQSTYRVVSVLTVLHQDWLNGKEYKCKVSNKALPAPIEKTISKAKGQPREPQVYTLPPSREEMTKNQVSLWCLVKGFYPSDIAVEWESNGQPENNYKTTPPVLDSDGSFFLYSKLTVDKSRWQQGNVFSCSVMHEALHNHYTQKSLSLSPGK

SEQ ID NO: 300 - DNA, 1530 bp, Artificial Sequence
  Description of Artificial Sequence: Synthetic polynucleotide
atgggcttcggactgtcgtggctttttctggtggcgattcttaagggggtccagtgcgataagtgccacacatgccctccctgtccagcacccgagctgctcgggggaccctcggtgttcttgtttcctcccaaacccaaagatacccttatgattagccggacaccagaggtgacgtgcgtggtagtagacgtgtcccatgaggacccggaggtcaagttcaactggtacgtggacggagtggaggtgcacaatgcaaagaccaagccgagggaagagcaataccagtccacatatagagtcgtgtcggtccttacggtcttgcatcaggactggctgaatggcaaagaatacaaatgtaaagtctccaacaaagctctcccagcgcccattgagaaaacaatctcaaaagcgaaaggccaaccgagagaacctcaagtctatactcttcccccgtcgagagaggaaatgaccaaaaaccaggtatccctgtcatgcgcggtcaaggggttttacccaagcgacatcgccgtggagtgggagtcgaacggacagccagagaataactataagacgacccctcccgtgctggattcggatggatcgttctttcttgtcagcaaactcacagtcgacaaatcaaggtggcagcaagggaacgtgttcagctgttcggtaatgcatgaagccctccacaatcactacacgcagaaatccctgtcgctctcaccagggaagggtgggggtggctcagggggtgggggatcaggtggtggtggtagcggaggtggagggagcggaggcggaggctccggtggaggaggttccggaggtggcgggtcagggggaggagggtcatgtccgccgtgccctgcccccgaattgctgggaggtccgtccgtatttctgtttcccccgaagcctaaagatactcttatgatctcgcgaacgccggaagtaacttgtgtcgtggtagatgtctcacacgaagatcccgaagtgaaattcaattggtatgtcgacggcgtggaggtacataacgccaagacgaagcctagagaggaacagtaccagtcaacgtatcgggtcgtatccgtgctcaccgtgctccaccaggattggctgaacggaaaggagtacaagtgcaaagtctcgaacaaggcgttgcctgcgccaatcgaaaagacgatctccaaagctaagggacaaccaagggaaccacaagtgtatactctcccgccctcgcgcgaagagatgacaaagaatcaggtgtcactttggtgcttggtgaaggggttctatccctcggatattgcggtcgagtgggagagcaatggtcaaccggagaacaattacaagacgacaccgcccgtattggactccgacgggtccttctttctctactcgaagctcactgtagataagtcgcgatggcagcaggggaacgtctttagctgttccgtgatgcacgaggcacttcataaccactatacccagaagtcgttgtcgctttcccccggaaaatgataa

SEQ ID NO: 301 - protein, 508 aa, Artificial Sequence
  Description of Artificial Sequence: Synthetic polypeptide
MGFGLSWLFLVAILKGVQCDKCHTCPPCPAPELLGGPSVFLFPPKPKDTLMISRTPEVTCVVVDVSHEDPEVKFNWYVDGVEVHNAKTKPREEQYQSTYRVVSVLTVLHQDWLNGKEYKCKVSNKALPAPIEKTISKAKGQPREPQVYTLPPSREEMTKNQVSLSCAVKGFYPSDIAVEWESNGQPENNYKTTPPVLDSDGSFFLVSKLTVDKSRWQQGNVFSCSVMHEALHNHYTQKSLSLSPGKGGGGSGGGGSGGGGSGGGGSGGGGSGGGGSGGGGSGGGGSCPPCPAPELLGGPSVFLFPPKPKDTLMISRTPEVTCVVVDVSHEDPEVKFNWYVDGVEVHNAKTKPREEQYQSTYRVVSVLTVLHQDWLNGKEYKCKVSNKALPAPIEKTISKAKGQPREPQVYTLPPSREEMTKNQVSLWCLVKGFYPSDIAVEWESNGQPENNYKTTPPVLDSDGSFFLYSKLTVDKSRWQQGNVFSCSVMHEALHNHYTQKSLSLSPGK

SEQ ID NO: 302 - DNA, 1539 bp, Artificial Sequence
  Description of Artificial Sequence: Synthetic polynucleotide
atgggcttcggactgtcgtggctttttctggtggcgattcttaagggggtccagtgcgataaaacacacacatgcccaccatgcccagcgcctgaacttttgggaggtccctcggtgtttttgtttcctcctaagcctaaggacaccctgatgatctcccgcactccggaagtgacgtgtgtcgtagtcgacgtcagccatgaggaccctgaggtgaaattcaactggtacgtagatggtgtggaggtgcataatgcaaaaactaagcctcgggaggaacaatatcaaagcacataccgggtcgtgtccgtgctcacggtacttcatcaggattggctcaacgggaaagaatacaaatgtaaggtgtccaacaaggctctcccggcaccgattgagaaaacgatcagcaaggccaaggggcagccccgagaaccccaagtatacacacttcccccgtccagggaggagatgaccaagaaccaggtgtcgctgtcgtgtgcggtcaaggggttttatcccagcgacatcgcggtagagtgggagtcgaacggccagcccgagaacaactacaagacaacaccgcctgtattggactcggacgggtcgtttttcctggtcagcaagctcacagtggataaaagccgctggcagcaggggaatgtattctcctgctccgtcatgcacgaggcgcttcacaaccattacacgcaaaaatccctgtccttgtccaagtcatgcgacaagacgggaggaggagggtcaggcggaggaggaagcgggggtggagggtccggtggtggtgggagcggaggtggagggagcggtggaggtggtagcgggggaggtggatcgggagggggtgggagctgtccgccatgtccagccccggaacttctcgggggaccgtcagtctttctttttccgccgaagcccaaggacaccttgatgattagccgcacgccggaggtcacgtgcgtagtagtggatgtatcccacgaggaccccgaggtcaaattcaattggtatgtcgacggagtggaagtacacaacgcaaagacaaagccgagagaagagcagtaccaatccacttatagggtagtctcggtcttgacagtactgcaccaggactggcttaatggaaaggaatacaagtgcaaagtctcaaacaaagccctccccgcacccatcgaaaagacaatctcgaaagcgaaaggacagcccagagagcctcaagtgtataccctgcccccgtcaagagaagagatgacgaagaaccaagtgtccctctggtgtctcgtgaaaggtttttaccccagcgatattgccgtcgaatgggaaagcaatggtcagcccgaaaacaattacaagactacgcctcccgtattggattcggatggttcgttcttcttgtactcaaagcttactgtcgataagtcgcggtggcagcaaggcaatgtgtttagctgttcggtaatgcatgaggcgctccacaatcactatacacagaagagcttgtccctcagcggggagtgctgataa

SEQ ID NO: 303 - protein, 511 aa, Artificial Sequence
  Description of Artificial Sequence: Synthetic polypeptide
MGFGLSWLFLVAILKGVQCDKTHTCPPCPAPELLGGPSVFLFPPKPKDTLMISRTPEVTCVVVDVSHEDPEVKFNWYVDGVEVHNAKTKPREEQYQSTYRVVSVLTVLHQDWLNGKEYKCKVSNKALPAPIEKTISKAKGQPREPQVYTLPPSREEMTKNQVSLSCAVKGFYPSDIAVEWESNGQPENNYKTTPPVLDSDGSFFLVSKLTVDKSRWQQGNVFSCSVMHEALHNHYTQKSLSLSKSCDKTGGGGSGGGGSGGGGSGGGGSGGGGSGGGGSGGGGSGGGGSCPPCPAPELLGGPSVFLFPPKPKDTLMISRTPEVTCVVVDVSHEDPEVKFNWYVDGVEVHNAKTKPREEQYQSTYRVVSVLTVLHQDWLNGKEYKCKVSNKALPAPIEKTISKAKGQPREPQVYTLPPSREEMTKNQVSLWCLVKGFYPSDIAVEWESNGQPENNYKTTPPVLDSDGSFFLYSKLTVDKSRWQQGNVFSCSVMHEALHNHYTQKSLSLSGEC

SEQ ID NO: 304 - DNA, 1470 bp, Artificial Sequence
  Description of Artificial Sequence: Synthetic polynucleotide
atgggcttcggactgtcgtggctttttctggtggcgattcttaagggggtccagtgcgacaagacccacacctgcccaccgtgtccagcgcccgagctcctcggagggccgtcggtgttcctctttcccccaaagcctaaagacactctgatgatcagccgcactccagaagtgacatgtgtggtggtggatgtctcgcatgaggacccggaagtcaaattcaattggtacgtggatggtgtcgaagtgcacaacgccaagacaaaaccgcgcgaggagcagtaccagagcacctaccgggtggtatcagtgcttacagtactgcatcaggattggctgaacggaaaggagtacaagtgtaaagtcagcaacaaagcgctcccggctccgatcgagaaaacgatctcaaaggccaagggccagccgcgagaaccccaagtatacacgttgcccccttcaagggaggaaatgaccaagaatcaggtgtcactgagctgcgccgtcaagggattctacccctcggacattgcagtagagtgggagtcgaatgggcaacccgaaaacaactataagacgacacccccggtcctcgactcagatggatcgttcttccttgtatcaaaattgacggtcgacaagagccggtggcagcaaggtaacgtattttcgtgttcggtgatgcatgaagcgctgcataaccactatacgcagaagagcttgtccttgtcaccaggcaagggaggtgggggttcgggcggaggaggtagcggcggagggggtagcggaggtggcgggtcctgtcccccgtgccccgcaccggagctgctgggaggtccgtcagtgtttttgtttcctcccaagccgaaagacacgctgatgatctcgaggacgcccgaggtaacgtgcgtcgtcgtcgatgtatcccacgaagatcccgaggtcaagttcaactggtatgtagatggggtcgaagtccataacgctaagacaaagccgagagaggaacaatatcagtcaacttatcgggtcgtgtcggtcctgaccgtacttcaccaggactggctcaatgggaaagagtacaaatgcaaggtgtccaataaggcgctgcctgcgccaattgagaaaactatctcgaaagcgaagggacagcccagagagccgcaagtatatacactgccaccctcgagagaagaaatgacgaagaatcaagtctccttgtggtgtttggtgaaggggttttacccttcagacatcgcagtggaatgggaatcgaacgggcagccagaaaacaattacaaaaccacacctcctgtccttgactccgatggctcatttttcctctattcgaagctcactgtcgacaagtcgcgctggcagcagggtaacgtctttagctgctccgtgatgcacgaggccctccacaatcattatacacagaaatcgctgtcactttcgcccggaaaatgataa

SEQ ID NO: 305 - protein, 488 aa, Artificial Sequence
  Description of Artificial Sequence: Synthetic polypeptide
MGFGLSWLFLVAILKGVQCDKTHTCPPCPAPELLGGPSVFLFPPKPKDTLMISRTPEVTCVVVDVSHEDPEVKFNWYVDGVEVHNAKTKPREEQYQSTYRVVSVLTVLHQDWLNGKEYKCKVSNKALPAPIEKTISKAKGQPREPQVYTLPPSREEMTKNQVSLSCAVKGFYPSDIAVEWESNGQPENNYKTTPPVLDSDGSFFLVSKLTVDKSRWQQGNVFSCSVMHEALHNHYTQKSLSLSPGKGGGGSGGGGSGGGGSGGGGSCPPCPAPELLGGPSVFLFPPKPKDTLMISRTPEVTCVVVDVSHEDPEVKFNWYVDGVEVHNAKTKPREEQYQSTYRVVSVLTVLHQDWLNGKEYKCKVSNKALPAPIEKTISKAKGQPREPQVYTLPPSREEMTKNQVSLWCLVKGFYPSDIAVEWESNGQPENNYKTTPPVLDSDGSFFLYSKLTVDKSRWQQGNVFSCSVMHEALHNHYTQKSLSLSPGK

SEQ ID NO: 306 - DNA, 1524 bp, Artificial Sequence
  Description of Artificial Sequence: Synthetic polynucleotide
atgggcttcggactgtcgtggctttttctggtggcgattcttaagggggtccagtgcgacaaaacgcacacctgtccgccctgtcctgccccggaacttctcggagggccttccgtgtttctcttccctccgaagcccaaggacacgctgatgatctcccggaccccggaggtcacgtgtgtggtagtagacgtgtcacacgaagatccggaggtgaagttcaactggtacgtagatggcgtggaggtgcacaacgccaaaacgaagccccgagaggaacagtaccagtcaacgtaccgcgtcgtgtcggtattgactgtattgcatcaagactggttgaacgggaaggagtataagtgtaaagtcagcaacaaggctcttcccgcacccattgaaaagacaatttcgaaagccaaaggccagcccagggagccccaagtgtacaccctgccacccagccgggaagagatgacaaagaatcaagtctcgcttagctgcgctgtcaagggcttctatccatcggacattgcagtggaatgggaatcaaacggacagccggagaataactataagacgacaccccctgtcctcgacagcgacgggtcgttcttccttgtgagcaagctcacggtcgacaaaagccgctggcagcagggaaacgtattctcatgttcggtgatgcacgaagcattgcataaccactacacgcagaagagcttgtcgttgagcaaatcatgcgacaagaccgggggtggtgggagcggcggaggaggtagcggcggaggtggctcgggaggaggtgggtcgggtggtgggggaagcggaggcggagggagcggaggtggtgggtcatgtccgccgtgcccggcacccgaactgctcggaggtccctcggtgttcctgttcccgccaaagcctaaggatacgttgatgatttcgcgcacgccggaggtaacatgcgtggtggtggatgtgtcacatgaggaccccgaggtcaagttcaattggtacgtcgatggagtggaagtgcacaatgcgaaaacaaaaccccgggaggagcagtatcagagcacgtacagggtagtctccgtcctgactgtacttcaccaagactggcttaacggaaaagagtataagtgcaaggtcagcaacaaggcgcttcctgcccctatcgagaaaaccatctcgaaggccaagggacagccgagggagcctcaagtatacacgctgccgccatcgagagaagaaatgaccaaaaaccaggtgtccctttggtgtttggtgaagggtttctatccctccgatatcgccgtagagtgggagtcaaatggacagcctgagaacaactataagactacgccccctgtgttggacagcgatgggtcattctttctgtattcgaaactcacggtggataagtcgcgatggcaacagggcaatgtgttttcgtgcagcgtgatgcatgaggcgctgcacaaccactatactcagaaatcgttaagcttatcgggagagtgttgataa

SEQ ID NO: 307 - protein, 506 aa, Artificial Sequence
  Description of Artificial Sequence: Synthetic polypeptide
MGFGLSWLFLVAILKGVQCDKTHTCPPCPAPELLGGPSVFLFPPKPKDTLMISRTPEVTCVVVDVSHEDPEVKFNWYVDGVEVHNAKTKPREEQYQSTYRVVSVLTVLHQDWLNGKEYKCKVSNKALPAPIEKTISKAKGQPREPQVYTLPPSREEMTKNQVSLSCAVKGFYPSDIAVEWESNGQPENNYKTTPPVLDSDGSFFLVSKLTVDKSRWQQGNVFSCSVMHEALHNHYTQKSLSLSKSCDKTGGGGSGGGGSGGGGSGGGGSGGGGSGGGGSGGGGSCPPCPAPELLGGPSVFLFPPKPKDTLMISRTPEVTCVVVDVSHEDPEVKFNWYVDGVEVHNAKTKPREEQYQSTYRVVSVLTVLHQDWLNGKEYKCKVSNKALPAPIEKTISKAKGQPREPQVYTLPPSREEMTKNQVSLWCLVKGFYPSDIAVEWESNGQPENNYKTTPPVLDSDGSFFLYSKLTVDKSRWQQGNVFSCSVMHEALHNHYTQKSLSLSGEC

SEQ ID NO: 308 - DNA, 1524 bp, Artificial Sequence
  Description of Artificial Sequence: Synthetic polynucleotide
atgggcttcggactgtcgtggctttttctggtggcgattcttaagggggtccagtgcgacaaaacgcacacctgtccgccctgtcctgccccggaacttctcggagggccttccgtgtttctcttccctccgaagcccaaggacacgctgatgatctcccggaccccggaggtcacgtgtgtggtagtagacgtgtcacacgaagatccggaggtgaagttcaactggtacgtagatggcgtggaggtgcacaacgccaaaacgaagccccgagaggaacagtaccagtcaacgtaccgcgtcgtgtcggtattgactgtattgcatcaagactggttgaacgggaaggagtataagtgtaaagtcagcaacaaggctcttcccgcacccattgaaaagacaatttcgaaagccaaaggccagcccagggagccccaagtgtacaccctgccacccagccgggaagagatgacaaagaatcaagtctcgcttagctgcgctgtcaagggcttctatccatcggacattgcagtggaatgggaatcaaacggacagccggagaataactataagacgacaccccctgtcctcgacagcgacgggtcgttcttccttgtgagcaagctcacggtcgacaaaagccgctggcagcagggaaacgtattctcatgttcggtgatgcacgaagcattgcataaccactacacgcagaagagcttgtcgttgagcggggaatgcggagggggagggtccgggggtggtgggagcggcggaggaggtagcggcggaggtggctcgggaggaggtgggtcgggtggtgggggaagcggaggcggagggtcatgtccgccgtgcccggcacccgaactgctcggaggtccctcggtgttcctgttcccgccaaagcctaaggatacgttgatgatttcgcgcacgccggaggtaacatgcgtggtggtggatgtgtcacatgaggaccccgaggtcaagttcaattggtacgtcgatggagtggaagtgcacaatgcgaaaacaaaaccccgggaggagcagtatcagagcacgtacagggtagtctccgtcctgactgtacttcaccaagactggcttaacggaaaagagtataagtgcaaggtcagcaacaaggcgcttcctgcccctatcgagaaaaccatctcgaaggccaagggacagccgagggagcctcaagtatacacgctgccgccatcgagagaagaaatgaccaaaaaccaggtgtccctttggtgtttggtgaagggtttctatccctccgatatcgccgtagagtgggagtcaaatggacagcctgagaacaactataagactacgccccctgtgttggacagcgatgggtcattctttctgtattcgaaactcacggtggataagtcgcgatggcaacagggcaatgtgttttcgtgcagcgtgatgcatgaggcgctgcacaaccactatactcagaaatcgttaagcttatcgaagtcatgcgacaagacttgataa

SEQ ID NO: 309 - protein, 506 aa, Artificial Sequence
  Description of Artificial Sequence: Synthetic polypeptide
MGFGLSWLFLVAILKGVQCDKTHTCPPCPAPELLGGPSVFLFPPKPKDTLMISRTPEVTCVVVDVSHEDPEVKFNWYVDGVEVHNAKTKPREEQYQSTYRVVSVLTVLHQDWLNGKEYKCKVSNKALPAPIEKTISKAKGQPREPQVYTLPPSREEMTKNQVSLSCAVKGFYPSDIAVEWESNGQPENNYKTTPPVLDSDGSFFLVSKLTVDKSRWQQGNVFSCSVMHEALHNHYTQKSLSLSGECGGGGSGGGGSGGGGSGGGGSGGGGSGGGGSGGGGSCPPCPAPELLGGPSVFLFPPKPKDTLMISRTPEVTCVVVDVSHEDPEVKFNWYVDGVEVHNAKTKPREEQYQSTYRVVSVLTVLHQDWLNGKEYKCKVSNKALPAPIEKTISKAKGQPREPQVYTLPPSREEMTKNQVSLWCLVKGFYPSDIAVEWESNGQPENNYKTTPPVLDSDGSFFLYSKLTVDKSRWQQGNVFSCSVMHEALHNHYTQKSLSLSKSCDKT

SEQ ID NO: 310 - DNA, 1509 bp, Artificial Sequence
  Description of Artificial Sequence: Synthetic polynucleotide
atgggcttcggactgtcgtggctttttctggtggcgattcttaagggggtccagtgcgacaaaacgcacacctgtccgccctgtcctgccccggaacttctcggagggccttccgtgtttctcttccctccgaagcccaaggacacgctgatgatctcccggaccccggaggtcacgtgtgtggtagtagacgtgtcacacgaagatccggaggtgaagttcaactggtacgtagatggcgtggaggtgcacaacgccaaaacgaagccccgagaggaacagtaccagtcaacgtaccgcgtcgtgtcggtattgactgtattgcatcaagactggttgaacgggaaggagtataagtgtaaagtcagcaacaaggctcttcccgcacccattgaaaagacaatttcgaaagccaaaggccagcccagggagccccaagtgtacaccctgccacccagccgggaagagatgacaaagaatcaagtctcgcttagctgcgctgtcaagggcttctatccatcggacattgcagtggaatgggaatcaaacggacagccggagaataactataagacgacaccccctgtcctcgacagcgacgggtcgttcttccttgtgagcaagctcacggtcgacaaaagccgctggcagcagggaaacgtattctcatgttcggtgatgcacgaagcattgcataaccactacacgcagaagagcttgtcgttgagcaaatcatgcgacaagaccgggggtggtgggagcggcggaggaggtagcggcggaggtggctcgggaggaggtgggtcgggtggtgggggaagcggaggcggagggtcatgtccgccgtgcccggcacccgaactgctcggaggtccctcggtgttcctgttcccgccaaagcctaaggatacgttgatgatttcgcgcacgccggaggtaacatgcgtggtggtggatgtgtcacatgaggaccccgaggtcaagttcaattggtacgtcgatggagtggaagtgcacaatgcgaaaacaaaaccccgggaggagcagtatcagagcacgtacagggtagtctccgtcctgactgtacttcaccaagactggcttaacggaaaagagtataagtgcaaggtcagcaacaaggcgcttcctgcccctatcgagaaaaccatctcgaaggccaagggacagccgagggagcctcaagtatacacgctgccgccatcgagagaagaaatgaccaaaaaccaggtgtccctttggtgtttggtgaagggtttctatccctccgatatcgccgtagagtgggagtcaaatggacagcctgagaacaactataagactacgccccctgtgttggacagcgatgggtcattctttctgtattcgaaactcacggtggataagtcgcgatggcaacagggcaatgtgttttcgtgcagcgtgatgcatgaggcgctgcacaaccactatactcagaaatcgttaagcttatcgggagagtgttgataa

SEQ ID NO: 311 - protein, 501 aa, Artificial Sequence
  Description of Artificial Sequence: Synthetic polypeptide
MGFGLSWLFLVAILKGVQCDKTHTCPPCPAPELLGGPSVFLFPPKPKDTLMISRTPEVTCVVVDVSHEDPEVKFNWYVDGVEVHNAKTKPREEQYQSTYRVVSVLTVLHQDWLNGKEYKCKVSNKALPAPIEKTISKAKGQPREPQVYTLPPSREEMTKNQVSLSCAVKGFYPSDIAVEWESNGQPENNYKTTPPVLDSDGSFFLVSKLTVDKSRWQQGNVFSCSVMHEALHNHYTQKSLSLSKSCDKTGGGGSGGGGSGGGGSGGGGSGGGGSGGGGSCPPCPAPELLGGPSVFLFPPKPKDTLMISRTPEVTCVVVDVSHEDPEVKFNWYVDGVEVHNAKTKPREEQYQSTYRVVSVLTVLHQDWLNGKEYKCKVSNKALPAPIEKTISKAKGQPREPQVYTLPPSREEMTKNQVSLWCLVKGFYPSDIAVEWESNGQPENNYKTTPPVLDSDGSFFLYSKLTVDKSRWQQGNVFSCSVMHEALHNHYTQKSLSLSGEC

SEQ ID NO: 312 - DNA, 1494 bp, Artificial Sequence
  Description of Artificial Sequence: Synthetic polynucleotide
atgggcttcggactgtcgtggctttttctggtggcgattcttaagggggtccagtgcgacaaaacgcacacctgtccgccctgtcctgccccggaacttctcggagggccttccgtgtttctcttccctccgaagcccaaggacacgctgatgatctcccggaccccggaggtcacgtgtgtggtagtagacgtgtcacacgaagatccggaggtgaagttcaactggtacgtagatggcgtggaggtgcacaacgccaaaacgaagccccgagaggaacagtaccagtcaacgtaccgcgtcgtgtcggtattgactgtattgcatcaagactggttgaacgggaaggagtataagtgtaaagtcagcaacaaggctcttcccgcacccattgaaaagacaatttcgaaagccaaaggccagcccagggagccccaagtgtacaccctgccacccagccgggaagagatgacaaagaatcaagtctcgcttagctgcgctgtcaagggcttctatccatcggacattgcagtggaatgggaatcaaacggacagccggagaataactataagacgacaccccctgtcctcgacagcgacgggtcgttcttccttgtgagcaagctcacggtcgacaaaagccgctggcagcagggaaacgtattctcatgttcggtgatgcacgaagcattgcataaccactacacgcagaagagcttgtcgttgagcaaatcatgcgacaagaccgggggtggtgggagcggcggaggaggtagcggcggaggtggctcgggaggaggtgggtcgggtggtgggggatcatgtccgccgtgcccggcacccgaactgctcggaggtccctcggtgttcctgttcccgccaaagcctaaggatacgttgatgatttcgcgcacgccggaggtaacatgcgtggtggtggatgtgtcacatgaggaccccgaggtcaagttcaattggtacgtcgatggagtggaagtgcacaatgcgaaaacaaaaccccgggaggagcagtatcagagcacgtacagggtagtctccgtcctgactgtacttcaccaagactggcttaacggaaaagagtataagtgcaaggtcagcaacaaggcgcttcctgcccctatcgagaaaaccatctcgaaggccaagggacagccgagggagcctcaagtatacacgctgccgccatcgagagaagaaatgaccaaaaaccaggtgtccctttggtgtttggtgaagggtttctatccctccgatatcgccgtagagtgggagtcaaatggacagcctgagaacaactataagactacgccccctgtgttggacagcgatgggtcattctttctgtattcgaaactcacggtggataagtcgcgatggcaacagggcaatgtgttttcgtgcagcgtgatgcatgaggcgctgcacaaccactatactcagaaatcgttaagcttatcgggagagtgttgataa

SEQ ID NO: 313 - protein, 496 aa, Artificial Sequence
  Description of Artificial Sequence: Synthetic polypeptide
MGFGLSWLFLVAILKGVQCDKTHTCPPCPAPELLGGPSVFLFPPKPKDTLMISRTPEVTCVVVDVSHEDPEVKFNWYVDGVEVHNAKTKPREEQYQSTYRVVSVLTVLHQDWLNGKEYKCKVSNKALPAPIEKTISKAKGQPREPQVYTLPPSREEMTKNQVSLSCAVKGFYPSDIAVEWESNGQPENNYKTTPPVLDSDGSFFLVSKLTVDKSRWQQGNVFSCSVMHEALHNHYTQKSLSLSKSCDKTGGGGSGGGGSGGGGSGGGGSGGGGSCPPCPAPELLGGPSVFLFPPKPKDTLMISRTPEVTCVVVDVSHEDPEVKFNWYVDGVEVHNAKTKPREEQYQSTYRVVSVLTVLHQDWLNGKEYKCKVSNKALPAPIEKTISKAKGQPREPQVYTLPPSREEMTKNQVSLWCLVKGFYPSDIAVEWESNGQPENNYKTTPPVLDSDGSFFLYSKLTVDKSRWQQGNVFSCSVMHEALHNHYTQKSLSLSGEC

SEQ ID NO: 314 - DNA, 1539 bp, Artificial Sequence
  Description of Artificial Sequence: Synthetic polynucleotide
atgggcttcggactgtcgtggctttttctggtggcgattcttaagggggtccagtgcgacaaaacgcacacttgtccgccctgccctgcgcccgaactgcttggaggcccttcggtgtttttgtttccgcccaagcctaaggacaccttgatgatcagccggacaccggaggtcacatgtgtcgtcgtggatgtctcgcacgaggatcccgaggtcaagtttaactggtatgtggatggagtggaggtccacaacgccaaaaccaagcccagggaggagcaataccagtcaacctatcgggtagtctcggtgctgacggtactgcaccaggactggttgaatggaaaagagtacaaatgcaaggtatcaaacaaggcccttcccgctcccatcgaaaagacgatcagcaaagcgaaagggcaacccagagagccccaagtctatacgctgcctccctcaagggaagaaatgacgaaaaaccaggtgcacttgacatgcctcgtgaaaggcttctacccgagcgacattgcggtggaatgggagtcaaatggtcagccggaaaacaactacaagacaactccaccggtccttgattcagacgggtcgttcgccctctatagcaaactcacggtcgacaagtcccgctggcagcagggtaacgtgttttcgtgttcagtgatgcacgaggctctgcataatcactacacacagaagtccctctccttgagcaaaagctgcgacaagacagggggtggaggttcaggcggtggtgggtcgggagggggagggtcaggtggaggcggcagcgggggtgggggatcgggaggaggagggtccgggggagggggttccggagggggtgggtcctgtcccccttgtccagcgccggagctgttgggcggaccttcggtattcttgtttcctcctaagcccaaagatacgcttatgatctcccgcaccccggaggtaacttgcgtcgtagtggatgtatcacatgaggacccagaagtcaagttcaattggtacgtggacggagtcgaagtccataacgctaaaacgaaaccgagagaggaacagtatcagagcacctaccgggtagtgagcgtgctcacagtgttgcatcaggattggctgaatgggaaggaatacaagtgcaaagtgtcgaataaggcattgccagcaccgattgagaaaacaatctcaaaagcgaagggacagccccgagagcctcaagtcactacactgccacccagccgcgaagagatgacaaagaatcaggtatccctcacgtgtcttgtgaaggggttctatccctccgatatcgcagtagagtgggaatcgaacgggcagccggagaacaattacaagactttcccgccagtgcttgattcggacggtagcttctttttgtattcgaagctcacggtagataagtcgaggtggcaacaaggaaatgtgttttcatgttcggtgatgcatgaagcgctccataaccactatacgcagaaatcgctttcgctctccggtgaatgctgataa

SEQ ID NO: 315 - protein, 511 aa, Artificial Sequence
  Description of Artificial Sequence: Synthetic polypeptide
MGFGLSWLFLVAILKGVQCDKTHTCPPCPAPELLGGPSVFLFPPKPKDTLMISRTPEVTCVVVDVSHEDPEVKFNWYVDGVEVHNAKTKPREEQYQSTYRVVSVLTVLHQDWLNGKEYKCKVSNKALPAPIEKTISKAKGQPREPQVYTLPPSREEMTKNQVHLTCLVKGFYPSDIAVEWESNGQPENNYKTTPPVLDSDGSFALYSKLTVDKSRWQQGNVFSCSVMHEALHNHYTQKSLSLSKSCDKTGGGGSGGGGSGGGGSGGGGSGGGGSGGGGSGGGGSGGGGSCPPCPAPELLGGPSVFLFPPKPKDTLMISRTPEVTCVVVDVSHEDPEVKFNWYVDGVEVHNAKTKPREEQYQSTYRVVSVLTVLHQDWLNGKEYKCKVSNKALPAPIEKTISKAKGQPREPQVTTLPPSREEMTKNQVSLTCLVKGFYPSDIAVEWESNGQPENNYKTFPPVLDSDGSFFLYSKLTVDKSRWQQGNVFSCSVMHEALHNHYTQKSLSLSGEC

SEQ ID NO: 316 - DNA, 1539 bp, Artificial Sequence
  Description of Artificial Sequence: Synthetic polynucleotide
atgggcttcggactgtcgtggctttttctggtggcgattcttaagggggtccagtgcgacaaaacgcacacttgtccgccgtgcccagcgcccgagttgcttggcggacccagcgtgtttttgtttcccccgaaaccgaaagatacattgatgattagcagaacgcccgaagtgacgtgtgtagtagtcgacgtgtcgcacgaagatccggaggtgaagttcaactggtatgtcgatggggtagaggtgcacaacgcgaaaaccaagcccagggaggagcagtaccagtcgacatatcgggtcgtgtcagtgctgacagtgctccatcaggactggttgaacgggaaggagtataagtgtaaagtcagcaacaaagccctccccgcacccatcgagaaaaccatttccaaggcaaagggacaaccgagggaaccacaagtctacactctcccaccctcccgcgaagaaatgacgaaaaaccaagtgtcactgacgtgtcttgtagatggtttctacccctcggacatcgcggtcgaatgggagtcgaatggacagccggagaacaattacgataccacacctcctgtcttggattcggacggctcattcttcctttacagcgatctcactgtcgacaagtcgcgctggcagcagggaaacgtcttttcctgttcggtaatgcacgaagctctgcacaatcactacacgcagaagtcgctttcactttccaaaagctgcgacaagacagggggtggaggttcaggcggtggtgggtcgggagggggagggtcaggtggaggcggcagcgggggtgggggatcgggaggaggagggtccgggggagggggttccggagggggtgggtcctgtcccccttgtccagcgccggagctgttgggcggaccttcggtattcttgtttcctcctaagcccaaagatacgcttatgatctcccgcaccccggaggtaacttgcgtcgtagtggatgtatcacatgaggacccagaagtcaagttcaattggtacgtggacggagtcgaagtccataacgctaaaacgaaaccgagagaggaacagtatcagagcacctaccgggtagtgagcgtgctcacagtgttgcatcaggattggctgaatgggaaggaatacaagtgcaaagtgtcgaataaggcattgccagcaccgattgagaaaacaatctcaaaagcgaagggacagccccgagagcctcaagtctatacactgccgccaagccggaagaagatgaccaaaaaccaggtgtccctcacgtgcctcgtgaaagggttttacccgtcagatatcgccgtagaatgggagagcaatgggcagcccgagaataactataagactacgccccctgtactcaaatcggacgggtcattctttctgtattcgaagctcacggtagataagtcgaggtggcaacaaggaaatgtgttttcatgttcggtgatgcatgaagcgctccataaccactatacgcagaaatcgctttcgctctccggtgaatgctgataa

SEQ ID NO: 317 - protein, 511 aa, Artificial Sequence
  Description of Artificial Sequence: Synthetic polypeptide
MGFGLSWLFLVAILKGVQCDKTHTCPPCPAPELLGGPSVFLFPPKPKDTLMISRTPEVTCVVVDVSHEDPEVKFNWYVDGVEVHNAKTKPREEQYQSTYRVVSVLTVLHQDWLNGKEYKCKVSNKALPAPIEKTISKAKGQPREPQVYTLPPSREEMTKNQVSLTCLVDGFYPSDIAVEWESNGQPENNYDTTPPVLDSDGSFFLYSDLTVDKSRWQQGNVFSCSVMHEALHNHYTQKSLSLSKSCDKTGGGGSGGGGSGGGGSGGGGSGGGGSGGGGSGGGGSGGGGSCPPCPAPELLGGPSVFLFPPKPKDTLMISRTPEVTCVVVDVSHEDPEVKFNWYVDGVEVHNAKTKPREEQYQSTYRVVSVLTVLHQDWLNGKEYKCKVSNKALPAPIEKTISKAKGQPREPQVYTLPPSRKKMTKNQVSLTCLVKGFYPSDIAVEWESNGQPENNYKTTPPVLKSDGSFFLYSKLTVDKSRWQQGNVFSCSVMHEALHNHYTQKSLSLSGEC

SEQ ID NO: 318 - DNA, 1530 bp, Artificial Sequence
  Description of Artificial Sequence: Synthetic polynucleotide
atgggcttcggactgtcgtggctttttctggtggcgattcttaagggggtccagtgcgacaagacccatacatgcccaagctgtcccgctccggagtttctcggtggaccgtcggtgtttctgttccctccgaagccaaaagataccttgatgatttcgcgaactcccgaagtcacgtgtgtcgtcgtggacgtaagccaggaggacccggaggtccagttcaattggtatgtagacggcgtagaggtacataatgcgaaaacgaagcccagagaggaacagttcaatagcaaataccgcgtagtatcggtgctgacagtgttgcaccaggactggctgaatggaaaagaatacaagtgtaaagtgtccaacaagggccttccatcgtcgattgaaaagacaatctccaaggcaaaggggcagcctagggagccccaagtctacaccctgcccccttcgcgggaggagatgacgaagaaccaggtatcactgtcatgcgcggtcaaaggattttacccgagcgacatcgccgtagaatgggagtccaacggacagccagaaaacaattacaagaccactcctccagtgctcgatagcgatggctccttctttcttgtcagcaaattgacagtcgataagtcaagatggcagcagggtaatgtgttctcatgtagcgtcatgcacgaagcactccacaatcattatacacagaagagcctctcgttgtcgcccggaaaaggcggaggtgggtcgggcggagggggaagcggtggaggagggtcaggaggtggaggttccgggggaggcggttcgggaggagggggttcgggtggtggaggatcgggtggcggaggaagctgcccttcatgtccagcccccgagttcctcggaggcccgtcggtctttctttttccccctaagcctaaagataccctgatgatcagccggacgcctgaggtgacttgtgtggtagtcgacgtgtcccaagaagatccggaagtccagtttaactggtatgtggatggagtggaggtccataatgccaagacaaagccaagggaggagcaattcaactcgaagtaccgcgtcgtgtccgtgctcacagtgcttcatcaagactggttgaacggaaaggagtacaaatgtaaggtatcaaacaagggtttgccctcgtccatcgagaaaaccatctcgaaagcgaaagggcaaccccgcgagccccaggtatatacgctcccgccttcaagagaagaaatgacgaaaaaccaagtgagcttgtggtgcctggtcaaggggttctatccctccgatatcgcggtagagtgggaaagcaatgggcagccggagaacaactataagacaacgcctcccgtgttggactcagatggatcgttcttcttgtactcaaagcttacggtggacaagtcacgctggcagcaagggaacgtgttttcgtgctcggtgatgcacgaggcgcttcacaatcactacactcagaaatcgcttagcttgtcaccaggaaaatgataa

SEQ ID NO: 319 - protein, 508 aa, Artificial Sequence
  Description of Artificial Sequence: Synthetic polypeptide
MGFGLSWLFLVAILKGVQCDKTHTCPSCPAPEFLGGPSVFLFPPKPKDTLMISRTPEVTCVVVDVSQEDPEVQFNWYVDGVEVHNAKTKPREEQFNSKYRVVSVLTVLHQDWLNGKEYKCKVSNKGLPSSIEKTISKAKGQPREPQVYTLPPSREEMTKNQVSLSCAVKGFYPSDIAVEWESNGQPENNYKTTPPVLDSDGSFFLVSKLTVDKSRWQQGNVFSCSVMHEALHNHYTQKSLSLSPGKGGGGSGGGGSGGGGSGGGGSGGGGSGGGGSGGGGSGGGGSCPSCPAPEFLGGPSVFLFPPKPKDTLMISRTPEVTCVVVDVSQEDPEVQFNWYVDGVEVHNAKTKPREEQFNSKYRVVSVLTVLHQDWLNGKEYKCKVSNKGLPSSIEKTISKAKGQPREPQVYTLPPSREEMTKNQVSLWCLVKGFYPSDIAVEWESNGQPENNYKTTPPVLDSDGSFFLYSKLTVDKSRWQQGNVFSCSVMHEALHNHYTQKSLSLSPGK

SEQ ID NO: 320 - DNA, 1530 bp, Artificial Sequence
  Description of Artificial Sequence: Synthetic polynucleotide
atgggcttcggactgtcgtggctttttctggtggcgattcttaagggggtccagtgcgataagacacacacgtgcccctcgtgccccgcaccggagttccttgggggtccgtcggtctttttgtttccccctaaacccaaggacacgctcatgatctcccgcacaccggaagtcacgtgcgtagtcgtggatgtctcacaagaggacccggaagtgcaattcaactggtacgtcgacggcgtggaggtgcacaatgccaagacgaaaccaagagaggaacagttcaactcaaagtaccgggtagtatcggtgttgacggtgctccatcaggattggcttaacggtaaagagtacaagtgtaaagtcagcaataagggtctgcccagctccatcgaaaagactatctccaaggccaaggggcagcctcgcgaaccgcaagtgtgtacgttgcccccgtcccgggaggagatgacgaaaaatcaggtcagcctctcgtgtgcggtgaaggggttttacccatccgacattgcggtggaatgggagagcaacggacagcccgaaaacaattacaagactaccccgccagtactcgatagcgacgggtcgttctttcttgtgtcgaaactgacagtggacaagtcaagatggcagcaaggaaatgtgttctcgtgtagcgtgatgcacgaggcactccacaatcattacacacagaagagcttgtccctctcccctggtaaaggaggaggagggtcgggtgggggaggcagcgggggaggaggatcaggaggtgggggttcaggcggagggggttcgggtggtgggggatcgggaggtggaggttcgggaggagggggctcctgtccgagctgccccgctcccgagttcttgggaggtccctcagtgtttcttttcccgccgaagcctaaagatacactgatgatttcacgaacccccgaagtgacatgcgtagtagtagatgtgtcgcaagaagatccggaagtccagttcaattggtatgtggatggggtggaggtccataatgcgaaaacaaaaccgcgggaagagcaattcaattcaaagtatagggtcgtcagcgtgctcacagtgctgcaccaggactggcttaatgggaaagaatacaagtgcaaggtatccaacaaggggttgccctcgtcgatcgagaaaacgatttcaaaagccaagggacaaccgagggaaccacaagtatgcacgctgccgccgtgtagggaagaaatgacgaagaaccaagtgagcctctggtgcctggtgaagggcttttatccctccgacatcgcagtcgagtgggaatcgaatgggcagccggagaacaactataagactactcccccagtgttggattcggatggatcatttttcctctactcgaaacttacggtcgacaaatcacgctggcagcagggcaacgtgttttcctgctcggtaatgcatgaggcgcttcacaaccactatacccagaagtcactgtcgcttagcccagggaaatgataa

SEQ ID NO: 321 - protein, 508 aa, Artificial Sequence
  Description of Artificial Sequence: Synthetic polypeptide
MGFGLSWLFLVAILKGVQCDKTHTCPSCPAPEFLGGPSVFLFPPKPKDTLMISRTPEVTCVVVDVSQEDPEVQFNWYVDGVEVHNAKTKPREEQFNSKYRVVSVLTVLHQDWLNGKEYKCKVSNKGLPSSIEKTISKAKGQPREPQVCTLPPSREEMTKNQVSLSCAVKGFYPSDIAVEWESNGQPENNYKTTPPVLDSDGSFFLVSKLTVDKSRWQQGNVFSCSVMHEALHNHYTQKSLSLSPGKGGGGSGGGGSGGGGSGGGGSGGGGSGGGGSGGGGSGGGGSCPSCPAPEFLGGPSVFLFPPKPKDTLMISRTPEVTCVVVDVSQEDPEVQFNWYVDGVEVHNAKTKPREEQFNSKYRVVSVLTVLHQDWLNGKEYKCKVSNKGLPSSIEKTISKAKGQPREPQVCTLPPCREEMTKNQVSLWCLVKGFYPSDIAVEWESNGQPENNYKTTPPVLDSDGSFFLYSKLTVDKSRWQQGNVFSCSVMHEALHNHYTQKSLSLSPGK

SEQ ID NO: 322 - DNA, 1530 bp, Artificial Sequence
  Description of Artificial Sequence: Synthetic polynucleotide
atgggcttcggactgtcgtggctttttctggtggcgattcttaagggggtccagtgcgacaagacccatacgtgcccatcgtgccccgcaccggagttcctcggaggcccgtcagtattcctttttcctccgaagcccaaagatacattgatgatcagcaggacgcctgaagtgacatgtgtagtggtagacgtgtcgcaagaagatccagaggtacagtttaactggtatgtcgacggggtggaagtccataacgccaagactaaaccccgcgaagagcagttcaactcaaagtatagagtagtctccgtcctgacagtcctccatcaggactggctgaacgggaaagaatacaagtgcaaagtctcgaacaaagggcttccgtcatcgatcgagaaaacgatttcaaaagccaagggacagcctagggagccgcaagtgtatactctgcccccgtcgcgcgaggagatgacgaaaaatcaggtgtccctcacgtgcctcgtcaaaggattttacccgtcggatatcgccgtggagtgggaatcgaatgggcaaccagagaacaactacaagaccactcccccggtgctggactcggacggctcctttttcttgacatcaaagctcacagtcgataagagccgctggcaacaagggaatgtgttcagctgctcggtgatgcacgaagcgctgcacaaccactatacccagaaatcattgtccctcagccccggaaagggaggtggagggtccggtgggggtggatcaggagggggtgggagcggaggaggcggcagcggtggcggagggtcaggtggaggcggatcaggtgggggaggttcaggcggtgggggctcgtgccccagctgtcctgctcccgagtttctcgggggaccttcagtctttctcttccctccgaaacccaaggacacgctgatgatttcgcggacacccgaagtgacttgtgtcgtggtcgacgtaagccaggaggaccccgaggtgcaattcaactggtacgtcgacggagtcgaggtccacaatgcgaaaacaaaacccagagaagaacagttcaattcgaaatatcgagtggtatcagtcctgaccgtgcttcatcaggattggctcaatgggaaagagtacaaatgcaaggtatcaaacaagggactgccaagctcaatcgaaaagactatctcgaaagcaaagggtcagcctcgggagccccaagtgtacacgcttcccccatccagggaagaaatgacgaagaaccaggtgtcgctctactgtttggtgaaggggttttatccttcggacatcgcggtggaatgggagtcgaatggacagccggagaataactacaaaacgactccgcctgtcctcgacagcgatgggtccttcttcctttactcaaaattgacagtagataagtcgcgctggcagcagggaaatgtattctcctgttccgtcatgcatgaggcgcttcacaatcactacactcagaagtccttgtcgttgtcaccaggaaaatgataa

SEQ ID NO: 323 - protein, 508 aa, Artificial Sequence
  Description of Artificial Sequence: Synthetic polypeptide
MGFGLSWLFLVAILKGVQCDKTHTCPSCPAPEFLGGPSVFLFPPKPKDTLMISRTPEVTCVVVDVSQEDPEVQFNWYVDGVEVHNAKTKPREEQFNSKYRVVSVLTVLHQDWLNGKEYKCKVSNKGLPSSIEKTISKAKGQPREPQVYTLPPSREEMTKNQVSLTCLVKGFYPSDIAVEWESNGQPENNYKTTPPVLDSDGSFFLTSKLTVDKSRWQQGNVFSCSVMHEALHNHYTQKSLSLSPGKGGGGSGGGGSGGGGSGGGGSGGGGSGGGGSGGGGSGGGGSCPSCPAPEFLGGPSVFLFPPKPKDTLMISRTPEVTCVVVDVSQEDPEVQFNWYVDGVEVHNAKTKPREEQFNSKYRVVSVLTVLHQDWLNGKEYKCKVSNKGLPSSIEKTISKAKGQPREPQVYTLPPSREEMTKNQVSLYCLVKGFYPSDIAVEWESNGQPENNYKTTPPVLDSDGSFFLYSKLTVDKSRWQQGNVFSCSVMHEALHNHYTQKSLSLSPGK

SEQ ID NO: 324 - DNA, 1530 bp, Artificial Sequence
  Description of Artificial Sequence: Synthetic polynucleotide
atgggcttcggactgtcgtggctttttctggtggcgattcttaagggggtccagtgcgacaagacatgctgttgcccaagctgtcccgctccggagtttctcggtggaccgtcggtgtttctgttccctccgaagccaaaagataccttgatgatttcgcgaactcccgaagtcacgtgtgtcgtcgtggacgtaagccaggaggacccggaggtccagttcaattggtatgtagacggcgtagaggtacataatgcgaaaacgaagcccagagaggaacagttcaatagcaaataccgcgtagtatcggtgctgacagtgttgcaccaggactggctgaatggaaaagaatacaagtgtaaagtgtccaacaagggccttccatcgtcgattgaaaagacaatctccaaggcaaaggggcagcctagggagccccaagtctacaccctgcccccttcgcgggaggagatgacgaagaaccaggtatcactgtcatgcgcggtcaaaggattttacccgagcgacatcgccgtagaatgggagtccaacggacagccagaaaacaattacaagaccactcctccagtgctcgatagcgatggctccttctttcttgtcagcaaattgacagtcgataagtcaagatggcagcagggtaatgtgttctcatgtagcgtcatgcacgaagcactccacaatcattatacacagaagagcctctcgttgtcgcccggaaaaggcggaggtgggtcgggcggagggggaagcggtggaggagggtcaggaggtggaggttccgggggaggcggttcgggaggagggggttcgggtggtggaggatcgggtggcggaggaagctgcccttcatgtccagcccccgagttcctcggaggcccgtcggtctttctttttccccctaagcctaaagataccctgatgatcagccggacgcctgaggtgacttgtgtggtagtcgacgtgtcccaagaagatccggaagtccagtttaactggtatgtggatggagtggaggtccataatgccaagacaaagccaagggaggagcaattcaactcgaagtaccgcgtcgtgtccgtgctcacagtgcttcatcaagactggttgaacggaaaggagtacaaatgtaaggtatcaaacaagggtttgccctcgtccatcgagaaaaccatctcgaaagcgaaagggcaaccccgcgagccccaggtatatacgctcccgccttcaagagaagaaatgactaaaaaccaagtgagcttgtggtgcctggtcaaggggttctatccctccgatatcgcggtagagtgggaaagcaatgggcagccggagaacaactataagacaacgcctcccgtgttggactcagatggatcgttcttcttgtactcaaagcttacggtggacaagtcacgctggcagcaagggaacgtgttttcgtgctcggtgatgcacgaggcgcttcacaatcactacactcagaaatcgcttagcttgtcaccaggaaaatgataa

SEQ ID NO: 325 - protein, 508 aa, Artificial Sequence
  Description of Artificial Sequence: Synthetic polypeptide
MGFGLSWLFLVAILKGVQCDKTCCCPSCPAPEFLGGPSVFLFPPKPKDTLMISRTPEVTCVVVDVSQEDPEVQFNWYVDGVEVHNAKTKPREEQFNSKYRVVSVLTVLHQDWLNGKEYKCKVSNKGLPSSIEKTISKAKGQPREPQVYTLPPSREEMTKNQVSLSCAVKGFYPSDIAVEWESNGQPENNYKTTPPVLDSDGSFFLVSKLTVDKSRWQQGNVFSCSVMHEALHNHYTQKSLSLSPGKGGGGSGGGGSGGGGSGGGGSGGGGSGGGGSGGGGSGGGGSCPSCPAPEFLGGPSVFLFPPKPKDTLMISRTPEVTCVVVDVSQEDPEVQFNWYVDGVEVHNAKTKPREEQFNSKYRVVSVLTVLHQDWLNGKEYKCKVSNKGLPSSIEKTISKAKGQPREPQVYTLPPSREEMTKNQVSLWCLVKGFYPSDIAVEWESNGQPENNYKTTPPVLDSDGSFFLYSKLTVDKSRWQQGNVFSCSVMHEALHNHYTQKSLSLSPGK

SEQ ID NO: 326 - DNA, 1530 bp, Artificial Sequence
  Description of Artificial Sequence: Synthetic polynucleotide
atgggcttcggactgtcgtggctttttctggtggcgattcttaagggggtccagtgcgacaagtgccatacatgcccaagctgtcccgctccggagtttctcggtggaccgtcggtgtttctgttccctccgaagccaaaagataccttgatgatttcgcgaactcccgaagtcacgtgtgtcgtcgtggacgtaagccaggaggacccggaggtccagttcaattggtatgtagacggcgtagaggtacataatgcgaaaacgaagcccagagaggaacagttcaatagcaaataccgcgtagtatcggtgctgacagtgttgcaccaggactggctgaatggaaaagaatacaagtgtaaagtgtccaacaagggccttccatcgtcgattgaaaagacaatctccaaggcaaaggggcagcctagggagccccaagtctacaccctgcccccttcgcgggaggagatgacgaagaaccaggtatcactgtcatgcgcggtcaaaggattttacccgagcgacatcgccgtagaatgggagtccaacggacagccagaaaacaattacaagaccactcctccagtgctcgatagcgatggctccttctttcttgtcagcaaattgacagtcgataagtcaagatggcagcagggtaatgtgttctcatgtagcgtcatgcacgaagcactccacaatcattatacacagaagagcctctcgttgtcgcccggaaaaggcggaggtgggtcgggcggagggggaagcggtggaggagggtcaggaggtggaggttccgggggaggcggttcgggaggagggggttcgggtggtggaggatcgggtggcggaggaagctgcccttcatgtccagcccccgagttcctcggaggcccgtcggtctttctttttccccctaagcctaaagataccctgatgatcagccggacgcctgaggtgacttgtgtggtagtcgacgtgtcccaagaagatccggaagtccagtttaactggtatgtggatggagtggaggtccataatgccaagacaaagccaagggaggagcaattcaactcgaagtaccgcgtcgtgtccgtgctcacagtgcttcatcaagactggttgaacggaaaggagtacaaatgtaaggtatcaaacaagggtttgccctcgtccatcgagaaaaccatctcgaaagcgaaagggcaaccccgcgagccccaggtatatacgctcccgccttcaagagaagaaatgacgaaaaaccaagtgagcttgtggtgcctggtcaaggggttctatccctccgatatcgcggtagagtgggaaagcaatgggcagccggagaacaactataagacaacgcctcccgtgttggactcagatggatcgttcttcttgtactcaaagcttacggtggacaagtcacgctggcagcaagggaacgtgttttcgtgctcggtgatgcacgaggcgcttcacaatcactacactcagaaatcgcttagcttgtcaccaggaaaatgataa

SEQ ID NO: 327 - protein, 508 aa, Artificial Sequence
  Description of Artificial Sequence: Synthetic polypeptide
MGFGLSWLFLVAILKGVQCDKCHTCPSCPAPEFLGGPSVFLFPPKPKDTLMISRTPEVTCVVVDVSQEDPEVQFNWYVDGVEVHNAKTKPREEQFNSKYRVVSVLTVLHQDWLNGKEYKCKVSNKGLPSSIEKTISKAKGQPREPQVYTLPPSREEMTKNQVSLSCAVKGFYPSDIAVEWESNGQPENNYKTTPPVLDSDGSFFLVSKLTVDKSRWQQGNVFSCSVMHEALHNHYTQKSLSLSPGKGGGGSGGGGSGGGGSGGGGSGGGGSGGGGSGGGGSGGGGSCPSCPAPEFLGGPSVFLFPPKPKDTLMISRTPEVTCVVVDVSQEDPEVQFNWYVDGVEVHNAKTKPREEQFNSKYRVVSVLTVLHQDWLNGKEYKCKVSNKGLPSSIEKTISKAKGQPREPQVYTLPPSREEMTKNQVSLWCLVKGFYPSDIAVEWESNGQPENNYKTTPPVLDSDGSFFLYSKLTVDKSRWQQGNVFSCSVMHEALHNHYTQKSLSLSPGK

SEQ ID NO: 328 - DNA, 1539 bp, Artificial Sequence
  Description of Artificial Sequence: Synthetic polynucleotide
atgggcttcggactgtcgtggctttttctggtggcgattcttaagggggtccagtgcgataaaacgcacacgtgcccctcgtgtccggcaccggagtttcttggaggtccctcggtgttcctgttccctcccaagccgaaggacacgttgatgatttcgaggacgccggaggtgacgtgtgtggtcgtagacgtgagccaggaggacccggaagtgcagtttaactggtacgtcgatggagtagaagtacataatgccaagacgaagcccagggaggaacaattcaattcgaagtatcgcgtcgtatccgtgctgactgtgctccaccaggactggcttaacggaaaagaatacaagtgcaaggtatcaaataagggactcccctcgtcgatcgagaaaacaatcagcaaagcgaaaggacagccgagggaaccgcaagtgtacacattgccgccgtcgcgagaagaaatgaccaagaaccaggtatcactctcgtgcgccgtgaagggcttttacccatcggacattgctgtggagtgggagagcaacggtcaacccgagaataactacaaaactacaccgcccgtgctggattccgacggctcattctttctcgtgtcaaaactgactgtggataagtcgcgctggcaacaggggaatgtgttctcgtgcagcgtcatgcatgaagctcttcataatcactacacccaaaaatccctgtcactctcgaaaagctgtgataagaccgggggtgggggctccggaggaggcggttcgggtggcggtgggtcgggtggaggcggatcgggcggtgggggaagcggtggtggtggaagcggagggggtggatcaggtggagggggcagctgtccatcctgccctgcaccagagtttttgggaggaccgtccgtatttctgtttccgcccaagcccaaagatactttgatgatcagcaggacgcctgaggtaacatgtgtagtggtcgatgtctcgcaagaggaccctgaggtccagttcaattggtacgtggacggggtggaagtccacaacgcgaaaacgaaaccacgcgaagaacagttcaacagcaaatacagagtcgtgtcagtcttgacagtccttcaccaggattggttgaatggaaaggagtacaagtgtaaggtgtcaaacaaaggactgcccagctcgatcgaaaagacaatttcgaaggcaaaaggtcaaccgcgggagccacaagtgtatacgctgccgccctcgcgggaggagatgacaaagaatcaggtgtcgctgtggtgtctggtaaaaggattctatccatccgatatcgcggtagagtgggaatcaaacggccagccggagaacaattacaagaccacgccccctgtattggattcggacggatcgttcttcttgtattcgaaactcacggtggacaagtcgcggtggcagcagggtaatgtgttttcatgctcagtcatgcacgaggcgctccataaccattatactcagaagtcgctgtccttgtccggggagtgctgataa

SEQ ID NO: 329 - protein, 511 aa, Artificial Sequence
  Description of Artificial Sequence: Synthetic polypeptide
MGFGLSWLFLVAILKGVQCDKTHTCPSCPAPEFLGGPSVFLFPPKPKDTLMISRTPEVTCVVVDVSQEDPEVQFNWYVDGVEVHNAKTKPREEQFNSKYRVVSVLTVLHQDWLNGKEYKCKVSNKGLPSSIEKTISKAKGQPREPQVYTLPPSREEMTKNQVSLSCAVKGFYPSDIAVEWESNGQPENNYKTTPPVLDSDGSFFLVSKLTVDKSRWQQGNVFSCSVMHEALHNHYTQKSLSLSKSCDKTGGGGSGGGGSGGGGSGGGGSGGGGSGGGGSGGGGSGGGGSCPSCPAPEFLGGPSVFLFPPKPKDTLMISRTPEVTCVVVDVSQEDPEVQFNWYVDGVEVHNAKTKPREEQFNSKYRVVSVLTVLHQDWLNGKEYKCKVSNKGLPSSIEKTISKAKGQPREPQVYTLPPSREEMTKNQVSLWCLVKGFYPSDIAVEWESNGQPENNYKTTPPVLDSDGSFFLYSKLTVDKSRWQQGNVFSCSVMHEALHNHYTQKSLSLSGEC

SEQ ID NO: 330 - DNA, 1524 bp, Artificial Sequence
  Description of Artificial Sequence: Synthetic polynucleotide
atgggcttcggactgtcgtggctttttctggtggcgattcttaagggggtccagtgcgacaaaacgcacacctgtccgtcatgtcctgccccggaattccttggagggccttccgtgtttctcttccctccgaagcccaaggacacgctgatgatctcccggaccccggaggtcacgtgtgtggtagtagacgtgtcacaagaagatccggaggtgcagttcaactggtacgtagatggcgtggaggtgcacaacgccaaaacgaagccccgagaggaacagttcaattcgaagtaccgcgtcgtgtcggtattgactgtattgcatcaagactggttgaacgggaaggagtataagtgtaaagtcagcaacaagggacttccctcgtcaattgaaaagacaatttcgaaagccaaaggccagcccagggagccccaagtgtacaccctgccacccagccgggaagagatgacaaagaatcaagtctcgcttagctgcgctgtcaagggcttctatccatcggacattgcagtggaatgggaatcaaacggacagccggagaataactataagacgacaccccctgtcctcgacagcgacgggtcgttcttccttgtgagcaagctcacggtcgacaaaagccgctggcagcagggaaacgtattctcatgttcggtgatgcacgaagcattgcataaccactacacgcagaagagcttgtcgttgtcgaaaagctgcgacaagacgggagggggagggtccgggggtggtgggagcggcggaggaggtagcggcggaggtggctcgggaggaggtgggtcgggtggtgggggaagcggaggcggagggtcatgtccgagctgcccggcacccgaatttctcggaggtccctcggtgttcctgttcccgccaaagcctaaggatacgttgatgatttcgcgcacgccggaggtaacatgcgtggtggtggatgtgtcacaagaggaccccgaggtccagttcaattggtacgtcgatggagtggaagtgcacaatgcgaaaacaaaaccccgggaggagcagttcaatagcaagtacagggtagtctccgtcctgactgtacttcaccaagactggcttaacggaaaagagtataagtgcaaggtcagcaacaaggggcttccttcatccatcgagaaaaccatctcgaaggccaagggacagccgagggagcctcaagtatacacgctgccgccatcgagagaagaaatgaccaaaaaccaggtgtccctttggtgtttggtgaagggtttctatccctccgatatcgccgtagagtgggagtcaaatggacagcctgagaacaactataagactacgccccctgtgttggacagcgatgggtcattctttctgtattcgaaactcacggtggataagtcgcgatggcaacagggcaatgtgttttcgtgcagcgtgatgcatgaggcgctgcacaaccactatactcagaaatcgttaagcttatcgggagagtgttgataa

SEQ ID NO: 331 - protein, 506 aa, Artificial Sequence
  Description of Artificial Sequence: Synthetic polypeptide
MGFGLSWLFLVAILKGVQCDKTHTCPSCPAPEFLGGPSVFLFPPKPKDTLMISRTPEVTCVVVDVSQEDPEVQFNWYVDGVEVHNAKTKPREEQFNSKYRVVSVLTVLHQDWLNGKEYKCKVSNKGLPSSIEKTISKAKGQPREPQVYTLPPSREEMTKNQVSLSCAVKGFYPSDIAVEWESNGQPENNYKTTPPVLDSDGSFFLVSKLTVDKSRWQQGNVFSCSVMHEALHNHYTQKSLSLSKSCDKTGGGGSGGGGSGGGGSGGGGSGGGGSGGGGSGGGGSCPSCPAPEFLGGPSVFLFPPKPKDTLMISRTPEVTCVVVDVSQEDPEVQFNWYVDGVEVHNAKTKPREEQFNSKYRVVSVLTVLHQDWLNGKEYKCKVSNKGLPSSIEKTISKAKGQPREPQVYTLPPSREEMTKNQVSLWCLVKGFYPSDIAVEWESNGQPENNYKTTPPVLDSDGSFFLYSKLTVDKSRWQQGNVFSCSVMHEALHNHYTQKSLSLSGEC

SEQ ID NO: 332 - DNA, 1524 bp, Artificial Sequence
  Description of Artificial Sequence: Synthetic polynucleotide
atgggcttcggactgtcgtggctttttctggtggcgattcttaagggggtccagtgcgacaaaacgcacacctgtccgtcatgtcctgccccggaattccttggagggccttccgtgtttctcttccctccgaagcccaaggacacgctgatgatctcccggaccccggaggtcacgtgtgtggtagtagacgtgtcacaagaagatccggaggtgcagttcaactggtacgtagatggcgtggaggtgcacaacgccaaaacgaagccccgagaggaacagttcaattcgaagtaccgcgtcgtgtcggtattgactgtattgcatcaagactggttgaacgggaaggagtataagtgtaaagtcagcaacaagggacttccctcgtcaattgaaaagacaatttcgaaagccaaaggccagcccagggagccccaagtgtacaccctgccacccagccgggaagagatgacaaagaatcaagtctcgcttagctgcgctgtcaagggcttctatccatcggacattgcagtggaatgggaatcaaacggacagccggagaataactataagacgacaccccctgtcctcgacagcgacgggtcgttcttccttgtgagcaagctcacggtcgacaaaagccgctggcagcagggaaacgtattctcatgttcggtgatgcacgaagcattgcataaccactacacgcagaagagcttgtcgttgtcgggggaatgcggagggggagggtccggagggggagggtccgggggtggtgggagcggcggaggaggtagcggcggaggtggctcgggaggaggtgggtcgggtggtgggggatcatgtccgagctgcccggcacccgaatttctcggaggtccctcggtgttcctgttcccgccaaagcctaaggatacgttgatgatttcgcgcacgccggaggtaacatgcgtggtggtggatgtgtcacaagaggaccccgaggtccagttcaattggtacgtcgatggagtggaagtgcacaatgcgaaaacaaaaccccgggaggagcagttcaatagcaagtacagggtagtctccgtcctgactgtacttcaccaagactggcttaacggaaaagagtataagtgcaaggtcagcaacaaggggcttccttcatccatcgagaaaaccatctcgaaggccaagggacagccgagggagcctcaagtatacacgctgccgccatcgagagaagaaatgaccaaaaaccaggtgtccctttggtgtttggtgaagggtttctatccctccgatatcgccgtagagtgggagtcaaatggacagcctgagaacaactataagactacgccccctgtgttggacagcgatgggtcattctttctgtattcgaaactcacggtggataagtcgcgatggcaacagggcaatgtgttttcgtgcagcgtgatgcatgaggcgctgcacaaccactatactcagaaatcgttaagcttatcgaagtcatgcgacaagacttgataa

SEQ ID NO: 333 - protein, 506 aa, Artificial Sequence
  Description of Artificial Sequence: Synthetic polypeptide
MGFGLSWLFLVAILKGVQCDKTHTCPSCPAPEFLGGPSVFLFPPKPKDTLMISRTPEVTCVVVDVSQEDPEVQFNWYVDGVEVHNAKTKPREEQFNSKYRVVSVLTVLHQDWLNGKEYKCKVSNKGLPSSIEKTISKAKGQPREPQVYTLPPSREEMTKNQVSLSCAVKGFYPSDIAVEWESNGQPENNYKTTPPVLDSDGSFFLVSKLTVDKSRWQQGNVFSCSVMHEALHNHYTQKSLSLSGECGGGGSGGGGSGGGGSGGGGSGGGGSGGGGSGGGGSCPSCPAPEFLGGPSVFLFPPKPKDTLMISRTPEVTCVVVDVSQEDPEVQFNWYVDGVEVHNAKTKPREEQFNSKYRVVSVLTVLHQDWLNGKEYKCKVSNKGLPSSIEKTISKAKGQPREPQVYTLPPSREEMTKNQVSLWCLVKGFYPSDIAVEWESNGQPENNYKTTPPVLDSDGSFFLYSKLTVDKSRWQQGNVFSCSVMHEALHNHYTQKSLSLSKSCDKT

SEQ ID NO: 334 - DNA, 1509 bp, Artificial Sequence
  Description of Artificial Sequence: Synthetic polynucleotide
atgggcttcggactgtcgtggctttttctggtggcgattcttaagggggtccagtgcgacaaaacgcacacctgtccgtcatgtcctgccccggaattccttggagggccttccgtgtttctcttccctccgaagcccaaggacacgctgatgatctcccggaccccggaggtcacgtgtgtggtagtagacgtgtcacaagaagatccggaggtgcagttcaactggtacgtagatggcgtggaggtgcacaacgccaaaacgaagccccgagaggaacagttcaattcgaagtaccgcgtcgtgtcggtattgactgtattgcatcaagactggttgaacgggaaggagtataagtgtaaagtcagcaacaagggacttccctcgtcaattgaaaagacaatttcgaaagccaaaggccagcccagggagccccaagtgtacaccctgccacccagccgggaagagatgacaaagaatcaagtctcgcttagctgcgctgtcaagggcttctatccatcggacattgcagtggaatgggaatcaaacggacagccggagaataactataagacgacaccccctgtcctcgacagcgacgggtcgttcttccttgtgagcaagctcacggtcgacaaaagccgctggcagcagggaaacgtattctcatgttcggtgatgcacgaagcattgcataaccactacacgcagaagagcttgtcgttgtcgaaaagctgcgacaagacgggagggggagggtccgggggtggtgggagcggcggaggaggtagcggcggaggtggctcgggaggaggtgggtcgggtggtgggggatcatgtccgagctgcccggcacccgaatttctcggaggtccctcggtgttcctgttcccgccaaagcctaaggatacgttgatgatttcgcgcacgccggaggtaacatgcgtggtggtggatgtgtcacaagaggaccccgaggtccagttcaattggtacgtcgatggagtggaagtgcacaatgcgaaaacaaaaccccgggaggagcagttcaatagcaagtacagggtagtctccgtcctgactgtacttcaccaagactggcttaacggaaaagagtataagtgcaaggtcagcaacaaggggcttccttcatccatcgagaaaaccatctcgaaggccaagggacagccgagggagcctcaagtatacacgctgccgccatcgagagaagaaatgaccaaaaaccaggtgtccctttggtgtttggtgaagggtttctatccctccgatatcgccgtagagtgggagtcaaatggacagcctgagaacaactataagactacgccccctgtgttggacagcgatgggtcattctttctgtattcgaaactcacggtggataagtcgcgatggcaacagggcaatgtgttttcgtgcagcgtgatgcatgaggcgctgcacaaccactatactcagaaatcgttaagcttatcgggagagtgttgataa

SEQ ID NO: 335 - protein, 501 aa, Artificial Sequence
  Description of Artificial Sequence: Synthetic polypeptide
MGFGLSWLFLVAILKGVQCDKTHTCPSCPAPEFLGGPSVFLFPPKPKDTLMISRTPEVTCVVVDVSQEDPEVQFNWYVDGVEVHNAKTKPREEQFNSKYRVVSVLTVLHQDWLNGKEYKCKVSNKGLPSSIEKTISKAKGQPREPQVYTLPPSREEMTKNQVSLSCAVKGFYPSDIAVEWESNGQPENNYKTTPPVLDSDGSFFLVSKLTVDKSRWQQGNVFSCSVMHEALHNHYTQKSLSLSKSCDKTGGGGSGGGGSGGGGSGGGGSGGGGSGGGGSCPSCPAPEFLGGPSVFLFPPKPKDTLMISRTPEVTCVVVDVSQEDPEVQFNWYVDGVEVHNAKTKPREEQFNSKYRVVSVLTVLHQDWLNGKEYKCKVSNKGLPSSIEKTISKAKGQPREPQVYTLPPSREEMTKNQVSLWCLVKGFYPSDIAVEWESNGQPENNYKTTPPVLDSDGSFFLYSKLTVDKSRWQQGNVFSCSVMHEALHNHYTQKSLSLSGEC

SEQ ID NO: 336 - DNA, 1494 bp, Artificial Sequence
  Description of Artificial Sequence: Synthetic polynucleotide
atgggcttcggactgtcgtggctttttctggtggcgattcttaagggggtccagtgcgacaaaacgcacacctgtccgtcatgtcctgccccggaattccttggagggccttccgtgtttctcttccctccgaagcccaaggacacgctgatgatctcccggaccccggaggtcacgtgtgtggtagtagacgtgtcacaagaagatccggaggtgcagttcaactggtacgtagatggcgtggaggtgcacaacgccaaaacgaagccccgagaggaacagttcaattcgaagtaccgcgtcgtgtcggtattgactgtattgcatcaagactggttgaacgggaaggagtataagtgtaaagtcagcaacaagggacttccctcgtcaattgaaaagacaatttcgaaagccaaaggccagcccagggagccccaagtgtacaccctgccacccagccgggaagagatgacaaagaatcaagtctcgcttagctgcgctgtcaagggcttctatccatcggacattgcagtggaatgggaatcaaacggacagccggagaataactataagacgacaccccctgtcctcgacagcgacgggtcgttcttccttgtgagcaagctcacggtcgacaaaagccgctggcagcagggaaacgtattctcatgttcggtgatgcacgaagcattgcataaccactacacgcagaagagcttgtcgttgtcgaaaagctgcgacaagacgggagggggagggtccgggggtggtgggagcggcggaggaggtagcggcggaggtggctcgggaggaggtgggtcatgtccgagctgcccggcacccgaatttctcggaggtccctcggtgttcctgttcccgccaaagcctaaggatacgttgatgatttcgcgcacgccggaggtaacatgcgtggtggtggatgtgtcacaagaggaccccgaggtccagttcaattggtacgtcgatggagtggaagtgcacaatgcgaaaacaaaaccccgggaggagcagttcaatagcaagtacagggtagtctccgtcctgactgtacttcaccaagactggcttaacggaaaagagtataagtgcaaggtcagcaacaaggggcttccttcatccatcgagaaaaccatctcgaaggccaagggacagccgagggagcctcaagtatacacgctgccgccatcgagagaagaaatgaccaaaaaccaggtgtccctttggtgtttggtgaagggtttctatccctccgatatcgccgtagagtgggagtcaaatggacagcctgagaacaactataagactacgccccctgtgttggacagcgatgggtcattctttctgtattcgaaactcacggtggataagtcgcgatggcaacagggcaatgtgttttcgtgcagcgtgatgcatgaggcgctgcacaaccactatactcagaaatcgttaagcttatcgggagagtgttgataa

SEQ ID NO: 337 - protein, 496 aa, Artificial Sequence
  Description of Artificial Sequence: Synthetic polypeptide
MGFGLSWLFLVAILKGVQCDKTHTCPSCPAPEFLGGPSVFLFPPKPKDTLMISRTPEVTCVVVDVSQEDPEVQFNWYVDGVEVHNAKTKPREEQFNSKYRVVSVLTVLHQDWLNGKEYKCKVSNKGLPSSIEKTISKAKGQPREPQVYTLPPSREEMTKNQVSLSCAVKGFYPSDIAVEWESNGQPENNYKTTPPVLDSDGSFFLVSKLTVDKSRWQQGNVFSCSVMHEALHNHYTQKSLSLSKSCDKTGGGGSGGGGSGGGGSGGGGSGGGGSCPSCPAPEFLGGPSVFLFPPKPKDTLMISRTPEVTCVVVDVSQEDPEVQFNWYVDGVEVHNAKTKPREEQFNSKYRVVSVLTVLHQDWLNGKEYKCKVSNKGLPSSIEKTISKAKGQPREPQVYTLPPSREEMTKNQVSLWCLVKGFYPSDIAVEWESNGQPENNYKTTPPVLDSDGSFFLYSKLTVDKSRWQQGNVFSCSVMHEALHNHYTQKSLSLSGEC

SEQ ID NO: 338 - DNA, 1539 bp, Artificial Sequence
  Description of Artificial Sequence: Synthetic polynucleotide
atgggcttcggactgtcgtggctttttctggtggcgattcttaagggggtccagtgcgacaaaacgcacacttgtccttcctgccctgccccggagttccttggcggaccctcggtctttttgtttccgccgaaaccgaaagacacccttatgattagcaggacacccgaagtcacgtgtgtcgtcgtggacgtgtcgcaagaggatcccgaggtgcagttcaactggtacgtggacggggtagaagtccacaatgccaagacaaaaccccgggaagaacagtttaactcgaagtaccgcgtagtgtcagtcttgacagtcctccatcaggactggcttaacgggaaggagtacaaatgtaaagtgtcaaacaagggtctgccttccagcattgagaaaacgatctccaaggctaaagggcagccccgagaaccacaagtctatacgcttccaccatcgcgggaggagatgaccaagaaccaggtccacttgacctgtctcgtgaaggggttctacccgtcagatatcgcggtagagtgggaatcgaacggccagcccgagaataactacaagacgactcctccggtcctcgattcagatgggtcgttcgcactctactcaaaacttacggtggacaagtcgagatggcagcagggcaacgtgtttagctgctcagtcatgcacgaggcgctgcataatcactatacacagaagtcgctgtcattgtcaaaaagctgcgacaagacagggggtggaggttcaggcggtggtgggtcgggagggggagggtcaggtggaggcggcagcgggggtgggggatcgggaggaggagggtccgggggagggggttccggagggggtgggtcctgtccgtcgtgccctgcaccggaattcttgggcggtccgtcagtgttcctgtttcccccgaaacccaaagatacgctcatgatttcccgcacccctgaggtcacttgcgtggtagtcgatgtcagccaggaagatcccgaagtacagttcaattggtacgtagatggtgtagaagtacacaacgctaaaactaagcctcgcgaagagcagttcaattcgaagtatcgggtagtaagcgtgctgactgtgctccatcaagactggctgaatggaaaagagtataagtgcaaagtctcgaataagggattgcccagctccatcgagaaaaccatctcgaaagcgaagggacagcccagagaaccccaagtgaccacattgccaccctcccgagaggaaatgactaagaatcaagtgtcactcacatgtcttgtgaagggattctatcccagcgacatcgccgtcgagtgggagtccaatgggcagccggaaaacaattacaaaacgtttccacccgtccttgactcagatggatcgttctttctctattcgaagctcacggtagataagtcgaggtggcaacaaggaaatgtgttttcatgttcggtgatgcatgaagcgctccataaccactatacgcagaaatcgctttcgctctccggtgaatgctgataa

SEQ ID NO: 339 - protein, 511 aa, Artificial Sequence
  Description of Artificial Sequence: Synthetic polypeptide
MGFGLSWLFLVAILKGVQCDKTHTCPSCPAPEFLGGPSVFLFPPKPKDTLMISRTPEVTCVVVDVSQEDPEVQFNWYVDGVEVHNAKTKPREEQFNSKYRVVSVLTVLHQDWLNGKEYKCKVSNKGLPSSIEKTISKAKGQPREPQVYTLPPSREEMTKNQVHLTCLVKGFYPSDIAVEWESNGQPENNYKTTPPVLDSDGSFALYSKLTVDKSRWQQGNVFSCSVMHEALHNHYTQKSLSLSKSCDKTGGGGSGGGGSGGGGSGGGGSGGGGSGGGGSGGGGSGGGGSCPSCPAPEFLGGPSVFLFPPKPKDTLMISRTPEVTCVVVDVSQEDPEVQFNWYVDGVEVHNAKTKPREEQFNSKYRVVSVLTVLHQDWLNGKEYKCKVSNKGLPSSIEKTISKAKGQPREPQVTTLPPSREEMTKNQVSLTCLVKGFYPSDIAVEWESNGQPENNYKTFPPVLDSDGSFFLYSKLTVDKSRWQQGNVFSCSVMHEALHNHYTQKSLSLSGEC

SEQ ID NO: 340 - DNA, 1539 bp, Artificial Sequence
  Description of Artificial Sequence: Synthetic polynucleotide
atgggcttcggactgtcgtggctttttctggtggcgattcttaagggggtccagtgcgacaaaacgcacacttgtccttcctgccctgccccggagttccttggcggaccctcggtctttttgtttccgccgaaaccgaaagacacccttatgattagcaggacacccgaagtcacgtgtgtcgtcgtggacgtgtcgcaagaggatcccgaggtgcagttcaactggtacgtggacggggtagaagtccacaatgccaagacaaaaccccgggaagaacagtttaactcgaagtaccgcgtagtgtcagtcttgacagtcctccatcaggactggcttaacgggaaggagtacaaatgtaaagtgtcaaacaagggtctgccttccagcattgagaaaacgatctccaaggctaaaggacagccaagagagcctcaagtctatacattgcccccgagccgggaggaaatgaccaaaaaccaggtatcgcttacgtgcttggtggacgggttttacccttcagacatcgcagtggagtgggaatccaacgggcagccagagaacaattacgataccactccacccgtgcttgacagcgatggctcattcttcctctattccgacttgaccgtcgataagtcacgatggcagcaggggaatgtgtttagctgttcggtcatgcacgaagcgctgcacaaccactacacgcagaagtcgctctcattgtccaaaagctgcgacaagacagggggtggaggttcaggcggtggtgggtcgggagggggagggtcaggtggaggcggcagcgggggtgggggatcgggaggaggagggtccgggggagggggttccggagggggtgggtcctgtccgtcgtgccctgcaccggaattcttgggcggtccgtcagtgttcctgtttcccccgaaacccaaagatacgctcatgatttcccgcacccctgaggtcacttgcgtggtagtcgatgtcagccaggaagatcccgaagtacagttcaattggtacgtagatggtgtagaagtacacaacgctaaaactaagcctcgcgaagagcagttcaattcgaagtatcgggtagtaagcgtgctgactgtgctccatcaagactggctgaatggaaaagagtataagtgcaaagtctcgaataagggattgcccagctccatcgagaaaaccatctcgaaagcgaagggacagcccagagaaccccaagtgtatacgcttcccccttcaagaaagaagatgactaagaatcaggtgtcactcacgtgcctcgtgaagggattctatccgtcggacatcgcggtcgaatgggagtcgaatggacagccggagaacaactacaagacaacacctccagtgctgaaatcggatgggagcttctttctgtattcgaagctcacggtagataagtcgaggtggcaacaaggaaatgtgttttcatgttcggtgatgcatgaagcgctccataaccactatacgcagaaatcgctttcgctctccggtgaatgctgataa

SEQ ID NO: 341 - protein, 511 aa, Artificial Sequence
  Description of Artificial Sequence: Synthetic polypeptide
MGFGLSWLFLVAILKGVQCDKTHTCPSCPAPEFLGGPSVFLFPPKPKDTLMISRTPEVTCVVVDVSQEDPEVQFNWYVDGVEVHNAKTKPREEQFNSKYRVVSVLTVLHQDWLNGKEYKCKVSNKGLPSSIEKTISKAKGQPREPQVYTLPPSREEMTKNQVSLTCLVDGFYPSDIAVEWESNGQPENNYDTTPPVLDSDGSFFLYSDLTVDKSRWQQGNVFSCSVMHEALHNHYTQKSLSLSKSCDKTGGGGSGGGGSGGGGSGGGGSGGGGSGGGGSGGGGSGGGGSCPSCPAPEFLGGPSVFLFPPKPKDTLMISRTPEVTCVVVDVSQEDPEVQFNWYVDGVEVHNAKTKPREEQFNSKYRVVSVLTVLHQDWLNGKEYKCKVSNKGLPSSIEKTISKAKGQPREPQVYTLPPSRKKMTKNQVSLTCLVKGFYPSDIAVEWESNGQPENNYKTTPPVLKSDGSFFLYSKLTVDKSRWQQGNVFSCSVMHEALHNHYTQKSLSLSGEC

SEQ ID NO: 342 - DNA, 2907 bp, Artificial Sequence
  Description of Artificial Sequence: Synthetic polynucleotide
gaggtgcaactggtagaaagcggaggtggtcttgtacagcccggtggttcactcagactgtcgtgcgcagcttcagggtatacgttcacctcctactggctccattgggtgcgacaggctccggggaaaggactggaatgggtcgggatgattgatccgtcgaattcggatactaggttcaatcccaacttcaaggaccggtttaccattagcgcggatacctcgaaaaacaccgcatatctccaaatgaactcgttgagagccgaggacacggcggtgtattactgcgcaagatacgggtcgtatgtgtcaccgttggactactggggccaggggacactggtaacggtcagctcagctagcacgaagggacctagcgtgttcccattggcgcccagctcgaaatccacatcgggcggaacggcagcccttgggtgcctcgtgaaagactactttcccgaaccggtgactgtgtcgtggaattcaggggcattgacttccggtgtccacacatttccagccgtgctgcagtccagcgggttgtattcgctctcgtcagtggtcacagtcccatcctcctcgctcggaacacaaacctatatctgtaatgtcaaccataaaccttcaaatacaaaagtggacaaaaaggtagaaccgaaatcatgcgacaaaacgcacacctgtccgccctgtcctgccccggaacttctcggagggccttccgtgtttctcttccctccgaagcccaaggacacgctgatgatctcccggaccccggaggtcacgtgtgtggtagtagacgtgtcacacgaagatccggaggtgaagttcaactggtacgtagatggcgtggaggtgcacaacgccaaaacgaagccccgagaggaacagtaccagtcaacgtaccgcgtcgtgtcggtattgactgtattgcatcaagactggttgaacgggaaggagtataagtgtaaagtcagcaacaaggctcttcccgcacccattgaaaagacaatttcgaaagccaaaggccagcccagggagccccaagtgtacaccctgccacccagccgggaagagatgacaaagaatcaagtctcgcttagctgcgctgtcaagggcttctatccatcggacattgcagtggaatgggaatcaaacggacagccggagaataactataagacgacaccccctgtcctcgacagcgacgggtcgttcttccttgtgagcaagctcacggtcgacaaaagccgctggcagcagggaaacgtattctcatgttcggtgatgcacgaagcattgcataaccactacacgcagaagagcttgtcgttgagcggggaatgcggagggggagggtccgggggtggtgggagcggcggaggaggtagcggcggaggtggctcgggaggaggtgggtcgggtggtgggggaagcggaggcggagggtcatgtccgccgtgcccggcacccgaactgctcggaggtccctcggtgttcctgttcccgccaaagcctaaggatacgttgatgatttcgcgcacgccggaggtaacatgcgtggtggtggatgtgtcacatgaggaccccgaggtcaagttcaattggtacgtcgatggagtggaagtgcacaatgcgaaaacaaaaccccgggaggagcagtatcagagcacgtacagggtagtctccgtcctgactgtacttcaccaagactggcttaacggaaaagagtataagtgcaaggtcagcaacaaggcgcttcctgcccctatcgagaaaaccatctcgaaggccaagggacagccgagggagcctcaagtatacacgctgccgccatcgagagaagaaatgaccaaaaaccaggtgtccctttggtgtttggtgaagggtttctatccctccgatatcgccgtagagtgggagtcaaatggacagcctgagaacaactataagactacgccccctgtgttggacagcgatgggtcattctttctgtattcgaaactcacggtggataagtcgcgatggcaacagggcaatgtgttttcgtgcagcgtgatgcatgaggcgctgcacaaccactatactcagaaatcgttaagcttatcgaagtcatgcgacaagactggaggtggagggagcggtggtgggggatcccaagtccagttgcaagaaagcgggccaggactcgtgaaaccctcggaaaccctgtcactgacgtgcacggtgagcggagggtccgtgtcgagcggagattactattggacttggattagacagtcgcccggaaaaggtctggagtggatcggacacatctactactcggggaatacgaattacaacccgtcgttgaaatcacggctcacgattagcatcgatacctccaagacgcagttctcgctcaaacttagctccgtaactgcggccgacaccgcaatctactattgtgtacgcgaccgcgtcacaggggcttttgacatttggggtcagggcactatggtgacctcgtcagcgtcgacaggtggtgggggatcaggaggaggtggctccgggggaggcggaagcggcggtgggggctccgacatccagatgacgcagtcgccctcatcattgtcagcatcagtcggggacagggtcactattacttgtcaggccagccaagatatctcgaactatctgaactggtatcagcagaagcctggaaaagcgcctaagctccttatctatgatgcgtccaatcttgagacaggggtgccgtcgcggttttccggttcagggtcgggaacggacttcacgtttacaatctccagcctgcagccggaggacgaagccacctacttctgccaacacttcgaccatttgcctcttgcgttcggaggtgggacaaaggtggagatcaagcgaact

SEQ ID NO: 343 - protein, 969 aa, Artificial Sequence
  Description of Artificial Sequence: Synthetic polypeptide
EVQLVESGGGLVQPGGSLRLSCAASGYTFTSYWLHWVRQAPGKGLEWVGMIDPSNSDTRFNPNFKDRFTISADTSKNTAYLQMNSLRAEDTAVYYCARYGSYVSPLDYWGQGTLVTVSSASTKGPSVFPLAPSSKSTSGGTAALGCLVKDYFPEPVTVSWNSGALTSGVHTFPAVLQSSGLYSLSSVVTVPSSSLGTQTYICNVNHKPSNTKVDKKVEPKSCDKTHTCPPCPAPELLGGPSVFLFPPKPKDTLMISRTPEVTCVVVDVSHEDPEVKFNWYVDGVEVHNAKTKPREEQYQSTYRVVSVLTVLHQDWLNGKEYKCKVSNKALPAPIEKTISKAKGQPREPQVYTLPPSREEMTKNQVSLSCAVKGFYPSDIAVEWESNGQPENNYKTTPPVLDSDGSFFLVSKLTVDKSRWQQGNVFSCSVMHEALHNHYTQKSLSLSGECGGGGSGGGGSGGGGSGGGGSGGGGSGGGGSGGGGSCPPCPAPELLGGPSVFLFPPKPKDTLMISRTPEVTCVVVDVSHEDPEVKFNWYVDGVEVHNAKTKPREEQYQSTYRVVSVLTVLHQDWLNGKEYKCKVSNKALPAPIEKTISKAKGQPREPQVYTLPPSREEMTKNQVSLWCLVKGFYPSDIAVEWESNGQPENNYKTTPPVLDSDGSFFLYSKLTVDKSRWQQGNVFSCSVMHEALHNHYTQKSLSLSKSCDKTGGGGSGGGGSQVQLQESGPGLVKPSETLSLTCTVSGGSVSSGDYYWTWIRQSPGKGLEWIGHIYYSGNTNYNPSLKSRLTISIDTSKTQFSLKLSSVTAADTAIYYCVRDRVTGAFDIWGQGTMVTSSASTGGGGSGGGGSGGGGSGGGGSDIQMTQSPSSLSASVGDRVTITCQASQDISNYLNWYQQKPGKAPKLLIYDASNLETGVPSRFSGSGSGTDFTFTISSLQPEDEATYFCQHFDHLPLAFGGGTKVEIKRT

SEQ ID NO: 344 - DNA, 714 bp, Artificial Sequence
  Description of Artificial Sequence: Synthetic polynucleotide
atggggacccctgcgcagttgcttttcctcctccttctctggttgcccgacacgacaggagacatcgtgctgacccagtcaccggattcgcttgcagtctcactgggagagagagccacgatcaattgcaagtcctcggaatcagtggacagctacgctaactcattcatgcactggtatcagcagaagcctggccagccgcccaagttgctgatctaccgcgcaagcacacgggagtcgggggtgccagataggttttccggatcgggttcccgaacggacttcacactcacgatttcatccttgcaagccgaagatgtggcggtctattactgtcaacagtcgaaagaggatccccttacttttggtgggggtactaaagtagagattaagcgtacggtggcagcgccgtcagtctttatcttccctccttcggatgagcagcttaagagcgggacagcctcagtagtctgccttctcaacaacttttacccgagagaggccaaggtgcagtggaaggtggataatgccttgcagtcagggaactcacaagaatcggtcacagaacaggactccaaagatagcacttattccctgtcaagcacgctcactttgtccaaagcggactacgagaagcacaaagtgtacgcttgcgaggtgactcatcaaggattgtcgagccccgtaacgaagagcttcaatcggggcgagtgt

SEQ ID NO: 345 - protein, 238 aa, Artificial Sequence
  Description of Artificial Sequence: Synthetic polypeptide
MGTPAQLLFLLLLWLPDTTGDIVLTQSPDSLAVSLGERATINCKSSESVDSYANSFMHWYQQKPGQPPKLLIYRASTRESGVPDRFSGSGSRTDFTLTISSLQAEDVAVYYCQQSKEDPLTFGGGTKVEIKRTVAAPSVFIFPPSDEQLKSGTASVVCLLNNFYPREAKVQWKVDNALQSGNSQESVTEQDSKDSTYSLSSTLTLSKADYEKHKVYACEVTHQGLSSPVTKSFNRGEC

SEQ ID NO: 346 - DNA, 2913 bp, Artificial Sequence
  Description of Artificial Sequence: Synthetic polynucleotide
gaggtgcaactggtagaaagcggaggtggtcttgtacagcccggtggttcactcagactgtcgtgcgcagcttcagggtatacgttcacctcctactggctccattgggtgcgacaggctccggggaaaggactggaatgggtcgggatgattgatccgtcgaattcggatactaggttcaatcccaacttcaaggaccggtttaccattagcgcggatacctcgaaaaacaccgcatatctccaaatgaactcgttgagagccgaggacacggcggtgtattactgcgcaagatacgggtcgtatgtgtcaccgttggactactggggccaggggacactggtaacggtcagctcagctagcacgaagggacctagcgtgttcccattggcgcccagctcgaaatccacatcgggcggaacggcagcccttgggtgcctcgtgaaagactactttcccgaaccggtgactgtgtcgtggaattcaggggcattgacttccggtgtccacacatttccagccgtgctgcagtccagcgggttgtattcgctctcgtcagtggtcacagtcccatcctcctcgctcggaacacaaacctatatctgtaatgtcaaccataaaccttcaaatacaaaagtggacaaaaaggtagaaccgaaatcatgcgataagacccacacatgccctccctgtccagcacccgagctgctcgggggaccctcggtgttcttgtttcctcccaaacccaaagatacccttatgattagccggacaccagaggtgacgtgcgtggtagtagacgtgtcccatgaggacccggaggtcaagttcaactggtacgtggacggagtggaggtgcacaatgcaaagaccaagccgagggaagagcaataccagtccacatatagagtcgtgtcggtccttacggtcttgcatcaggactggctgaatggcaaagaatacaaatgtaaagtctccaacaaagctctcccagcgcccattgagaaaacaatctcaaaagcgaaaggccaaccgagagaacctcaagtctatactcttcccccgtcgagagaggaaatgaccaaaaaccaggtatccctgtcatgcgcggtcaaggggttttacccaagcgacatcgccgtggagtgggagtcgaacggacagccagagaataactataagacgacccctcccgtgctggattcggatggatcgttctttcttgtcagcaaactcacagtcgacaaatcaaggtggcagcaagggaacgtgttcagctgttcggtaatgcatgaagccctccacaatcactacacgcagaaatccctgtcgctctcaccagggaagactagacccgctccaccctcaaccgcgacaacagccggctcgacgcctcagcccgaatcggcctcaccgtcgggcaaagagcctgcggcatcgtcgccctcgtcaaccaatacaggctcatgtccgccgtgccctgcccccgaattgctgggaggtccgtccgtatttctgtttcccccgaagcctaaagatactcttatgatctcgcgaacgccggaagtaacttgtgtcgtggtagatgtctcacacgaagatcccgaagtgaaattcaattggtatgtcgacggcgtggaggtacataacgccaagacgaagcctagagaggaacagtaccagtcaacgtatcgggtcgtatccgtgctcaccgtgctccaccaggattggctgaacggaaaggagtacaagtgcaaagtctcgaacaaggcgttgcctgcgccaatcgaaaagacgatctccaaagctaagggacaaccaagggaaccacaagtgtatactctcccgccctcgcgcgaagagatgacaaagaatcaggtgtcactttggtgcttggtgaaggggttctatccctcggatattgcggtcgagtgggagagcaatggtcaaccggagaacaattacaagacgacaccgcccgtattggactccgacgggtccttctttctctactcgaagctcactgtagataagtcgcgatggcagcaggggaacgtctttagctgttccgtgatgcacgaggcacttcataaccactatacccagaagtcgttgtcgctttcccccggaaaaggaggtggagggagcggtggtgggggatcccaagtccagttgcaagaaagcgggccaggactcgtgaaaccctcggaaaccctgtcactgacgtgcacggtgagcggagggtccgtgtcgagcggagattactattggacttggattagacagtcgcccggaaaaggtctggagtggatcggacacatctactactcggggaatacgaattacaacccgtcgttgaaatcacggctcacgattagcatcgatacctccaagacgcagttctcgctcaaacttagctccgtaactgcggccgacaccgcaatctactattgtgtacgcgaccgcgtcacaggggcttttgacatttggggtcagggcactatggtgacctcgtcagcgtcgacaggtggtgggggatcaggaggaggtggctccgggggaggcggaagcggcggtgggggctccgacatccagatgacgcagtcgccctcatcattgtcagcatcagtcggggacagggtcactattacttgtcaggccagccaagatatctcgaactatctgaactggtatcagcagaagcctggaaaagcgcctaagctccttatctatgatgcgtccaatcttgagacaggggtgccgtcgcggttttccggttcagggtcgggaacggacttcacgtttacaatctccagcctgcagccggaggacgaagccacctacttctgccaacacttcgaccatttgcctcttgcgttcggaggtgggacaaaggtggagatcaagcgaact

SEQ ID NO: 347 - protein, 971 aa, Artificial Sequence
  Description of Artificial Sequence: Synthetic polypeptide
EVQLVESGGGLVQPGGSLRLSCAASGYTFTSYWLHWVRQAPGKGLEWVGMIDPSNSDTRFNPNFKDRFTISADTSKNTAYLQMNSLRAEDTAVYYCARYGSYVSPLDYWGQGTLVTVSSASTKGPSVFPLAPSSKSTSGGTAALGCLVKDYFPEPVTVSWNSGALTSGVHTFPAVLQSSGLYSLSSVVTVPSSSLGTQTYICNVNHKPSNTKVDKKVEPKSCDKTHTCPPCPAPELLGGPSVFLFPPKPKDTLMISRTPEVTCVVVDVSHEDPEVKFNWYVDGVEVHNAKTKPREEQYQSTYRVVSVLTVLHQDWLNGKEYKCKVSNKALPAPIEKTISKAKGQPREPQVYTLPPSREEMTKNQVSLSCAVKGFYPSDIAVEWESNGQPENNYKTTPPVLDSDGSFFLVSKLTVDKSRWQQGNVFSCSVMHEALHNHYTQKSLSLSPGKTRPAPPSTATTAGSTPQPESASPSGKEPAASSPSSTNTGSCPPCPAPELLGGPSVFLFPPKPKDTLMISRTPEVTCVVVDVSHEDPEVKFNWYVDGVEVHNAKTKPREEQYQSTYRVVSVLTVLHQDWLNGKEYKCKVSNKALPAPIEKTISKAKGQPREPQVYTLPPSREEMTKNQVSLWCLVKGFYPSDIAVEWESNGQPENNYKTTPPVLDSDGSFFLYSKLTVDKSRWQQGNVFSCSVMHEALHNHYTQKSLSLSPGKGGGGSGGGGSQVQLQESGPGLVKPSETLSLTCTVSGGSVSSGDYYWTWIRQSPGKGLEWIGHIYYSGNTNYNPSLKSRLTISIDTSKTQFSLKLSSVTAADTAIYYCVRDRVTGAFDIWGQGTMVTSSASTGGGGSGGGGSGGGGSGGGGSDIQMTQSPSSLSASVGDRVTITCQASQDISNYLNWYQQKPGKAPKLLIYDASNLETGVPSRFSGSGSGTDFTFTISSLQPEDEATYFCQHFDHLPLAFGGGTKVEIKRT

SEQ ID NO: 348 - DNA, 2913 bp, Artificial Sequence
  Description of Artificial Sequence: Synthetic polynucleotide
gaggtgcaactggtagaaagcggaggtggtcttgtacagcccggtggttcactcagactgtcgtgcgcagcttcagggtatacgttcacctcctactggctccattgggtgcgacaggctccggggaaaggactggaatgggtcgggatgattgatccgtcgaattcggatactaggttcaatcccaacttcaaggaccggtttaccattagcgcggatacctcgaaaaacaccgcatatctccaaatgaactcgttgagagccgaggacacggcggtgtattactgcgcaagatacgggtcgtatgtgtcaccgttggactactggggccaggggacactggtaacggtcagctcagctagcacgaagggacctagcgtgttcccattggcgcccagctcgaaatccacatcgggcggaacggcagcccttgggtgcctcgtgaaagactactttcccgaaccggtgactgtgtcgtggaattcaggggcattgacttccggtgtccacacatttccagccgtgctgcagtccagcgggttgtattcgctctcgtcagtggtcacagtcccatcctcctcgctcggaacacaaacctatatctgtaatgtcaaccataaaccttcaaatacaaaagtggacaaaaaggtagaaccgaaatcatgcgacaagacccatacatgcccaagctgtcccgctccggagtttctcggtggaccgtcggtgtttctgttccctccgaagccaaaagataccttgatgatttcgcgaactcccgaagtcacgtgtgtcgtcgtggacgtaagccaggaggacccggaggtccagttcaattggtatgtagacggcgtagaggtacataatgcgaaaacgaagcccagagaggaacagttcaatagcaaataccgcgtagtatcggtgctgacagtgttgcaccaggactggctgaatggaaaagaatacaagtgtaaagtgtccaacaagggccttccatcgtcgattgaaaagacaatctccaaggcaaaggggcagcctagggagccccaagtctacaccctgcccccttcgcgggaggagatgacgaagaaccaggtatcactgtcatgcgcggtcaaaggattttacccgagcgacatcgccgtagaatgggagtccaacggacagccagaaaacaattacaagaccactcctccagtgctcgatagcgatggctccttctttcttgtcagcaaattgacagtcgataagtcaagatggcagcagggtaatgtgttctcatgtagcgtcatgcacgaagcactccacaatcattatacacagaagagcctctcgttgtcgcccggaaaaactagacccgctccaccctcaaccgcgacaacagccggctcgacgcctcagcccgaatcggcctcaccgtcgggcaaagagcctgcggcatcgtcgccctcgtcaaccaatacaggctcatgcccttcatgtccagcccccgagttcctcggaggcccgtcggtctttctttttccccctaagcctaaagataccctgatgatcagccggacgcctgaggtgacttgtgtggtagtcgacgtgtcccaagaagatccggaagtccagtttaactggtatgtggatggagtggaggtccataatgccaagacaaagccaagggaggagcaattcaactcgaagtaccgcgtcgtgtccgtgctcacagtgcttcatcaagactggttgaacggaaaggagtacaaatgtaaggtatcaaacaagggtttgccctcgtccatcgagaaaaccatctcgaaagcgaaagggcaaccccgcgagccccaggtatatacgctcccgccttcaagagaagaaatgacgaaaaaccaagtgagcttgtggtgcctggtcaaggggttctatccctccgatatcgcggtagagtgggaaagcaatgggcagccggagaacaactataagacaacgcctcccgtgttggactcagatggatcgttcttcttgtactcaaagcttacggtggacaagtcacgctggcagcaagggaacgtgttttcgtgctcggtgatgcacgaggcgcttcacaatcactacactcagaaatcgcttagcttgtcaccaggaaaaggaggtggagggagcggtggtgggggatcccaagtccagttgcaagaaagcgggccaggactcgtgaaaccctcggaaaccctgtcactgacgtgcacggtgagcggagggtccgtgtcgagcggagattactattggacttggattagacagtcgcccggaaaaggtctggagtggatcggacacatctactactcggggaatacgaattacaacccgtcgttgaaatcacggctcacgattagcatcgatacctccaagacgcagttctcgctcaaacttagctccgtaactgcggccgacaccgcaatctactattgtgtacgcgaccgcgtcacaggggcttttgacatttggggtcagggcactatggtgacctcgtcagcgtcgacaggtggtgggggatcaggaggaggtggctccgggggaggcggaagcggcggtgggggctccgacatccagatgacgcagtcgccctcatcattgtcagcatcagtcggggacagggtcactattacttgtcaggccagccaagatatctcgaactatctgaactggtatcagcagaagcctggaaaagcgcctaagctccttatctatgatgcgtccaatcttgagacaggggtgccgtcgcggttttccggttcagggtcgggaacggacttcacgtttacaatctccagcctgcagccggaggacgaagccacctacttctgccaacacttcgaccatttgcctcttgcgttcggaggtgggacaaaggtggagatcaagcgaact

SEQ ID NO: 349 - protein, 971 aa, Artificial Sequence
  Description of Artificial Sequence: Synthetic polypeptide
EVQLVESGGGLVQPGGSLRLSCAASGYTFTSYWLHWVRQAPGKGLEWVGMIDPSNSDTRFNPNFKDRFTISADTSKNTAYLQMNSLRAEDTAVYYCARYGSYVSPLDYWGQGTLVTVSSASTKGPSVFPLAPSSKSTSGGTAALGCLVKDYFPEPVTVSWNSGALTSGVHTFPAVLQSSGLYSLSSVVTVPSSSLGTQTYICNVNHKPSNTKVDKKVEPKSCDKTHTCPSCPAPEFLGGPSVFLFPPKPKDTLMISRTPEVTCVVVDVSQEDPEVQFNWYVDGVEVHNAKTKPREEQFNSKYRVVSVLTVLHQDWLNGKEYKCKVSNKGLPSSIEKTISKAKGQPREPQVYTLPPSREEMTKNQVSLSCAVKGFYPSDIAVEWESNGQPENNYKTTPPVLDSDGSFFLVSKLTVDKSRWQQGNVFSCSVMHEALHNHYTQKSLSLSPGKTRPAPPSTATTAGSTPQPESASPSGKEPAASSPSSTNTGSCPSCPAPEFLGGPSVFLFPPKPKDTLMISRTPEVTCVVVDVSQEDPEVQFNWYVDGVEVHNAKTKPREEQFNSKYRVVSVLTVLHQDWLNGKEYKCKVSNKGLPSSIEKTISKAKGQPREPQVYTLPPSREEMTKNQVSLWCLVKGFYPSDIAVEWESNGQPENNYKTTPPVLDSDGSFFLYSKLTVDKSRWQQGNVFSCSVMHEALHNHYTQKSLSLSPGKGGGGSGGGGSQVQLQESGPGLVKPSETLSLTCTVSGGSVSSGDYYWTWIRQSPGKGLEWIGHIYYSGNTNYNPSLKSRLTISIDTSKTQFSLKLSSVTAADTAIYYCVRDRVTGAFDIWGQGTMVTSSASTGGGGSGGGGSGGGGSGGGGSDIQMTQSPSSLSASVGDRVTITCQASQDISNYLNWYQQKPGKAPKLLIYDASNLETGVPSRFSGSGSGTDFTFTISSLQPEDEATYFCQHFDHLPLAFGGGTKVEIKRT

SEQ ID NO: 350 - protein, 983 aa, Artificial Sequence
  Description of Artificial Sequence: Synthetic polypeptide
EVQLLESGGGLVQPGGSLRLSCAASGFTFSDYQMEWVRQAPGKGLEWVSYIYSSGGKTVYADSVKGRFTISRDNSKNTLYLQMNSLRAEDTAVYYCARLPRVGATIINDYWGQGTLVTVSSASTKGPSVFPLAPSSKSTSGGTAALGCLVKDYFPEPVTVSWNSGALTSGVHTFPAVLQSSGLYSLSSVVTVPSSSLGTQTYICNVNHKPSNTKVDKKVEPKSCDKTHTCPPCPAPELLGGPSVFLFPPKPKDTLMISRTPEVTCVVVDVSHEDPEVKFNWYVDGVEVHNAKTKPREEQYQSTYRVVSVLTVLHQDWLNGKEYKCKVSNKALPAPIEKTISKAKGQPREPQVYTLPPSREEMTKNQVSLSCAVKGFYPSDIAVEWESNGQPENNYKTTPPVLDSDGSFFLVSKLTVDKSRWQQGNVFSCSVMHEALHNHYTQKSLSLSKSCDKTGGGGSGGGGSGGGGSGGGGSGGGGSGGGGSGGGGSGGGGSCPPCPAPELLGGPSVFLFPPKPKDTLMISRTPEVTCVVVDVSHEDPEVKFNWYVDGVEVHNAKTKPREEQYQSTYRVVSVLTVLHQDWLNGKEYKCKVSNKALPAPIEKTISKAKGQPREPQVYTLPPSREEMTKNQVSLWCLVKGFYPSDIAVEWESNGQPENNYKTTPPVLDSDGSFFLYSKLTVDKSRWQQGNVFSCSVMHEALHNHYTQKSLSLSGECGGGGSGGGGSEVQLVQSGAEVKKPGSSVKVSCKASGGTFSSYAIGWVRQAPGQGLEWMGGIIPIFGIANYAQKFQGRVTITADESTSSAYMELSSLRSEDTAVYYCAREEGPYCSSTSCYAAFDIWGQGTLVTVSSASTGGGGSGGGGSGGGGSGGGGSQSVLTQDPAVSVALGQTVKITCQGDSLRSYFASWYQQKPGQAPTLVMYARNDRPAGVPDRFSGSKSGTSASLAISGLQPEDEADYYCAAWDDSLNGYLFGAGTKLTVL

SEQ ID NO: 351 - protein, 983 aa, Artificial Sequence [sequence omitted]

SEQ ID NO: 352 - protein, 975 aa, Artificial Sequence
  Description of Artificial Sequence: Synthetic polypeptide
EVQLLESGGGLVQPGGSLRLSCAASGFTFSDYQMEWVRQAPGKGLEWVSYIYSSGGKTVYADSVKGRFTISRDNSKNTLYLQMNSLRAEDTAVYYCARLPRVGATIINDYWGQGTLVTVSSASTKGPSVFPLAPSSKSTSGGTAALGCLVKDYFPEPVTVSWNSGALTSGVHTFPAVLQSSGLYSLSSVVTVPSSSLGTQTYICNVNHKPSNTKVDKKVEPKSCDKTHTCPPCPAPELLGGPSVFLFPPKPKDTLMISRTPEVTCVVVDVSHEDPEVKFNWYVDGVEVHNAKTKPREEQYQSTYRVVSVLTVLHQDWLNGKEYKCKVSNKALPAPIEKTISKAKGQPREPQVYTLPPSREEMTKNQVSLSCAVKGFYPSDIAVEWESNGQPENNYKTTPPVLDSDGSFFLVSKLTVDKSRWQQGNVFSCSVMHEALHNHYTQKSLSLSKSCDKTGGGGSGGGGSGGGGSGGGGSGGGGSGGGGSGGGGSGGGGSCPPCPAPELLGGPSVFLFPPKPKDTLMISRTPEVTCVVVDVSHEDPEVKFNWYVDGVEVHNAKTKPREEQYQSTYRVVSVLTVLHQDWLNGKEYKCKVSNKALPAPIEKTISKAKGQPREPQVYTLPPSREEMTKNQVSLWCLVKGFYPSDIAVEWESNGQPENNYKTTPPVLDSDGSFFLYSKLTVDKSRWQQGNVFSCSVMHEALHNHYTQKSLSLSGECGGGGSGGGGSQVKLEQSGAEVVKPGASVKLSCKASGFNIKDSYMHWLRQGPGQRLEWIGWIDPENGDTEYAPKFQGKATFTTDTSANTAYLGLSSLRPEDTAVYYCNEGTPTGPYYFDYWGQGTLVTVSSASTGGGGSGGGGSGGGGSGGGGSENVLTQSPSSMSVSVGDRVTIACSASSSVPYMHWLQQKPGKSPKLLIYLTSNLASGVPSRFSGSGSGTDYSLTISSVQPEDAATYYCQQRSSYPLTFGGGTKLEIK

SEQ ID NO: 353 - protein, 975 aa, Artificial Sequence
  Description of Artificial Sequence: Synthetic polypeptide
EVQLLESGGGLVQPGGSLRLSCAASGFTFSDYQMEWVRQAPGKGLEWVSYIYSSGGKTVYADSVKGRFTISRDNSKNTLYLQMNSLRAEDTAVYYCARLPRVGATIINDYWGQGTLVTVSSASTKGPSVFPLAPSSKSTSGGTAALGCLVKDYFPEPVTVSWNSGALTSGVHTFPAVLQSSGLYSLSSVVTVPSSSLGTQTYICNVNHKPSNTKVDKKVEPKSCDKTHTCPSCPAPEFLGGPSVFLFPPKPKDTLMISRTPEVTCVVVDVSQEDPEVQFNWYVDGVEVHNAKTKPREEQFNSKYRVVSVLTVLHQDWLNGKEYKCKVSNKGLPSSIEKTISKAKGQPREPQVYTLPPSREEMTKNQVSLSCAVKGFYPSDIAVEWESNGQPENNYKTTPPVLDSDGSFFLVSKLTVDKSRWQQGNVFSCSVMHEALHNHYTQKSLSLSKSCDKTGGGGSGGGGSGGGGSGGGGSGGGGSGGGGSGGGGSGGGGSCPSCPAPEFLGGPSVFLFPPKPKDTLMISRTPEVTCVVVDVSQEDPEVQFNWYVDGVEVHNAKTKPREEQFNSDYRVVSVLTVLHQDWLNGKEYKCKVSNKGLPSSIEKTISKAKGQPREPQVYTLPPSREEMTKNQVSLWCLVKGFYPSDIAVEWESNGQPENNYKTTPPVLDSDGSFFLYSKLTVDKSRWQQGNVFSCSVMHEALHNHYTQKSLSLSGECGGGGSGGGGSQVKLEQSGAEVVKPGASVKLSCKASGFNIKDSYMHWLRQGPGQRLEWIGWIDPENGDTEYAPKFQGKATFTTDTSANTAYLGLSSLRPEDTAVYYCNEGTPTGPYYFDYWGQGTLVTVSSASTGGGGSGGGGSGGGGSGGGGSENVLTQSPSSMSVSVGDRVTIACSASSSVPYMHWLQQKPGKSPKLLIYLTSNLASGVPSRFSGSGSGTDYSLTISSVQPEDAATYYCQQRSSYPLTFGGGTKLEIK

SEQ ID NO: 354 - protein, 980 aa, Artificial Sequence [sequence omitted]

SEQ ID NO: 355 - protein, 976 aa, Artificial Sequence [sequence omitted]

SEQ ID NO: 356 - protein, 980 aa, Artificial Sequence
  Description of Artificial Sequence: Synthetic polypeptide
QVKLEQSGAEVVKPGASVKLSCKASGFNIKDSYMHWLRQGPGQRLEWIGWIDPENGDTEYAPKFQGKATFTTDTSANTAYLGLSSLRPEDTAVYYCNEGTPTGPYYFDYWGQGTLVTVSSASTKGPSVFPLAPSSKSTSGGTAALGCLVKDYFPEPVTVSWNSGALTSGVHTFPAVLQSSGLYSLSSVVTVPSSSLGTQTYICNVNHKPSNTKVDKKVEPKSCDKTHTCPSCPAPEFLGGPSVFLFPPKPKDTLMISRTPEVTCVVVDVSQEDPEVQFNWYVDGVEVHNAKTKPREEQFNSKYRVVSVLTVLHQDWLNGKEYKCKVSNKGLPSSIEKTISKAKGQPREPQVYTLPPSREEMTKNQVSLSCAVKGFYPSDIAVEWESNGQPENNYKTTPPVLDSDGSFFLVSKLTVDKSRWQQGNVFSCSVMHEALHNHYTQKSLSLSKSCDKTGGGGSGGGGSGGGGSGGGGSGGGGSGGGGSGGGGSGGGGSCPSCPAPEFLGGPSVFLFPPKPKDTLMISRTPEVTCVVVDVSQEDPEVQFNWYVDGVEVHNAKTKPREEQFNSDYRVVSVLTVLHQDWLNGKEYKCKVSNKGLPSSIEKTISKAKGQPREPQVYTLPPSREEMTKNQVSLWCLVKGFYPSDIAVEWESNGQPENNYKTTPPVLDSDGSFFLYSKLTVDKSRWQQGNVFSCSVMHEALHNHYTQKSLSLSGECGGGGSGGGGSEVQLVESGGGLVQPGGSLRLSCAASGYTFTSYWLHWVRQAPGKGLEWVGMIDPSNSDTRFNPNFKDRFTISADTSKNTAYLQMNSLRAEDTAVYYCATYRSYVTPLDYWGQGTLVTVSSASTGGGGSGGGGSGGGGSGGGGSDIQMTQSPSSLSASVGDRVTITCKSSQSLLYTSSQKNYLAWYQQKPGKAPKLLIYWASTRESGVPSRFSGSGSGTDFTLTISSLQPEDFATYYCQQYYAYPWTFGQGTKVEIK

SEQ ID NO: 357 - protein, 492 aa, Artificial Sequence
  Description of Artificial Sequence: Synthetic polypeptide
DKTHTCPSCPAPEFLGGPSVFLFPPKPKDTLMISRTPEVTCVVVDVSQEDPEVQFNWYVDGVEVHNAKTKPREEQFNSTYRVVSVLTVLHQDWLNGKEYKCKVSNKGLPSSIEKTISKAKGQPREPQVYTLPPSREEMTKNQVSLSCAVKGFYPSDIAVEWESNGQPENNYKTTPPVLDSDGSFFLVSKLTVDKSRWQQGNVFSCSVMHEALHNHYTQKSLSLSKSCDKTGGGGSGGGGSGGGGSGGGGSGGGGSGGGGSGGGGSGGGGSCPSCPAPEFLGGPSVFLFPPKPKDTLMISRTPEVTCVVVDVSQEDPEVQFNWYVDGVEVHNAKTKPREEQFNSTYRVVSVLTVLHQDWLNGKEYKCKVSNKGLPSSIEKTISKAKGQPREPQVYTLPPSREEMTKNQVSLWCLVKGFYPSDIAVEWESNGQPENNYKTTPPVLDSDGSFFLYSKLTVDKSRWQQGNVFSCSVMHEALHNHYTQKSLSLSGEC

SEQ ID NO: 358 - DNA, 1482 bp, Artificial Sequence
  Description of Artificial Sequence: Synthetic polynucleotide
gacaaaacccacacatgcccctcatgtccagctccagagttcctgggaggaccaagcgtgttcctgtttccacctaagcctaaagataccctgatgatttccaggactccagaagtgacctgcgtggtggtggacgtgtctcaggaggaccccgaagtgcagttcaactggtacgtggacggcgtggaggtgcacaatgccaagacaaaacctcgggaggaacagtttaatagcacttacagagtggtgtctgtgctgactgtgctgcatcaggattggctgaacggaaaggaatacaagtgcaaagtgagtaataagggcctgccatctagtatcgagaaaacaatttccaaggctaaagggcagcctcgggaaccacaggtgtacaccctgcccccttcccgggaggaaatgactaagaaccaggtgtcactgagctgcgccgtgaaaggcttctacccttccgacatcgctgtggagtgggaatctaatgggcagccagaaaacaattataagaccacaccacccgtgctggactcagatgggagcttctttctggtgtctaagctgacagtggacaaaagtagatggcagcagggcaacgtgttttcctgctctgtgatgcacgaggccctgcacaatcattacactcagaaaagtctgtcactgagcaagtcctgtgataaaaccggcggaggaggcagcggaggaggagggtccggaggcgggggatctggcgggggaggcagtgggggaggcgggtcaggaggcgggggaagcggcgggggaggctccgggggaggcgggtcctgcccctcttgtcctgccccagagttcctgggaggcccatccgtgttcctgtttcctccaaagcccaaagacaccctgatgatctctaggacaccagaagtgacttgcgtggtggtggacgtgagtcaggaggaccccgaagtgcagttcaactggtatgtggatggcgtggaggtgcacaatgctaagacaaaacctcgggaggaacagtttaatagcacttacagagtggtgtctgtgctgactgtgctgcatcaggattggctgaacgggaaggagtataagtgcaaagtgagcaataagggactgccatctagtatcgagaaaaccattagcaaggccaaaggccagcccagggaacctcaggtgtataccctgccccctagccgcgaggaaatgacaaagaaccaggtgtccctgtggtgtctggtgaaaggattctatcccagtgacattgctgtggagtgggaatcaaatggccagcctgaaaacaattacaagactaccccacccgtgctggacagtgatggctcattctttctgtattcaaagctgaccgtggataaaagcagatggcagcagggaaacgtgttttcttgcagtgtgatgcatgaggctctgcacaatcattacacacagaagagcttaagcttaagcggcgagtgctgataa

SEQ ID NO: 359 - protein, 973 aa, Artificial Sequence
  Description of Artificial Sequence: Synthetic polypeptide
EVQLVESGGGLVQPGGSLRLSCAASGYTFTSYWLHWVRQAPGKGLEWVGMIDPSNSDTRFNPNFKDRFTISADTSKNTAYLQMNSLRAEDTAVYYCATYRSYVTPLDYWGQGTLVTVSSASTKGPSVFPLAPSSKSTSGGTAALGCLVKDYFPEPVTVSWNSGALTSGVHTFPAVLQSSGLYSLSSVVTVPSSSLGTQTYICNVNHKPSNTKVDKKVEPKSCDKTHTCPPCPAPELLGGPSVFLFPPKPKDTLMISRTPEVTCVVVDVSHEDPEVKFNWYVDGVEVHNAKTKPREEQYQSTYRVVSVLTVLHQDWLNGKEYKCKVSNKALPAPIEKTISKAKGQPREPQVYTLPPSREEMTKNQVSLSCAVKGFYPSDIAVEWESNGQPENNYKTTPPVLDSDGSFFLVSKLTVDKSRWQQGNVFSCSVMHEALHNHYTQKSLSLSKSCDKTGGGGSGGGGSGGGGSGGGGSGGGGSGGGGSGGGGSGGGGSCPPCPAPELLGGPSVFLFPPKPKDTLMISRTPEVTCVVVDVSHEDPEVKFNWYVDGVEVHNAKTKPREEQYQSTYRVVSVLTVLHQDWLNGKEYKCKVSNKALPAPIEKTISKAKGQPREPQVYTLPPSREEMTKNQVSLWCLVKGFYPSDIAVEWESNGQPENNYKTTPPVLDSDGSFFLYSKLTVDKSRWQQGNVFSCSVMHEALHNHYTQKSLSLSGECGGGGSGGGGSQVKLEQSGAEVVKPGASVKLSCKASGFNIKDSYMHWLRQGPGQRLEWIGWIDPENGDTEYAPKFQGKATFTTDTSANTAYLGLSSLRPEDTAVYYCNEGTPTGPYYFDYWGQGTLVTVSSASTGGGGSGGGGSGGGGSGGGGSENVLTQSPSSMSVSVGDRVTIACSASSSVPYMHWLQQKPGKSPKLLIYLTSNLASGVPSRFSGSGSGTDYSLTISSVQPEDAATYYCQQRSSYPLTFGGGTKLEIK

SEQ ID NO: 360 - protein, 973 aa, Artificial Sequence
  Description of Artificial Sequence: Synthetic polypeptide
EVQLVESGGGLVQPGGSLRLSCAASGYTFTSYWLHWVRQAPGKGLEWVGMIDPSNSDTRFNPNFKDRFTISADTSKNTAYLQMNSLRAEDTAVYYCATYRSYVTPLDYWGQGTLVTVSSASTKGPSVFPLAPSSKSTSGGTAALGCLVKDYFPEPVTVSWNSGALTSGVHTFPAVLQSSGLYSLSSVVTVPSSSLGTQTYICNVNHKPSNTKVDKKVEPKSCDKTHTCPSCPAPEFLGGPSVFLFPPKPKDTLMISRTPEVTCVVVDVSQEDPEVQFNWYVDGVEVHNAKTKPREEQFNSKYRVVSVLTVLHQDWLNGKEYKCKVSNKGLPSSIEKTISKAKGQPREPQVYTLPPSREEMTKNQVSLSCAVKGFYPSDIAVEWESNGQPENNYKTTPPVLDSDGSFFLVSKLTVDKSRWQQGNVFSCSVMHEALHNHYTQKSLSLSKSCDKTGGGGSGGGGSGGGGSGGGGSGGGGSGGGGSGGGGSGGGGSCPSCPAPEFLGGPSVFLFPPKPKDTLMISRTPEVTCVVVDVSQEDPEVQFNWYVDGVEVHNAKTKPREEQFNSDYRVVSVLTVLHQDWLNGKEYKCKVSNKGLPSSIEKTISKAKGQPREPQVYTLPPSREEMTKNQVSLWCLVKGFYPSDIAVEWESNGQPENNYKTTPPVLDSDGSFFLYSKLTVDKSRWQQGNVFSCSVMHEALHNHYTQKSLSLSGECGGGGSGGGGSQVKLEQSGAEVVKPGASVKLSCKASGFNIKDSYMHWLRQGPGQRLEWIGWIDPENGDTEYAPKFQGKATFTTDTSANTAYLGLSSLRPEDTAVYYCNEGTPTGPYYFDYWGQGTLVTVSSASTGGGGSGGGGSGGGGSGGGGSENVLTQSPSSMSVSVGDRVTIACSASSSVPYMHWLQQKPGKSPKLLIYLTSNLASGVPSRFSGSGSGTDYSLTISSVQPEDAATYYCQQRSSYPLTFGGGTKLEIK

SEQ ID NO: 361 - protein, 967 aa, Artificial Sequence [sequence omitted]

SEQ ID NO: 362 - protein, 967 aa, Artificial Sequence
  Description of Artificial Sequence: Synthetic polypeptide
EVQLVESGGGLVQPGGSLRLSCAASGYTFTSYWLHWVRQAPGKGLEWVGMIDPSNSDTRFNPNFKDRFTISADTSKNTAYLQMNSLRAEDTAVYYCATYRSYVTPLDYWGQGTLVTVSSASTKGPSVFPLAPSSKSTSGGTAALGCLVKDYFPEPVTVSWNSGALTSGVHTFPAVLQSSGLYSLSSVVTVPSSSLGTQTYICNVNHKPSNTKVDKKVEPKSCDKTHTCPPCPAPELLGGPSVFLFPPKPKDTLMISRTPEVTCVVVDVSHEDPEVKFNWYVDGVEVHNAKTKPREEQYQSTYRVVSVLTVLHQDWLNGKEYKCKVSNKALPAPIEKTISKAKGQPREPQVYTLPPSREEMTKNQVSLSCAVKGFYPSDIAVEWESNGQPENNYKTTPPVLDSDGSFFLVSKLTVDKSRWQQGNVFSCSVMHEALHNHYTQKSLSLSKSCDKTGGGGSGGGGSGGGGSGGGGSGGGGSGGGGSGGGGSGGGGSCPPCPAPELLGGPSVFLFPPKPKDTLMISRTPEVTCVVVDVSHEDPEVKFNWYVDGVEVHNAKTKPREEQYQSTYRVVSVLTVLHQDWLNGKEYKCKVSNKALPAPIEKTISKAKGQPREPQVYTLPPSREEMTKNQVSLWCLVKGFYPSDIAVEWESNGQPENNYKTTPPVLDSDGSFFLYSKLTVDKSRWQQGNVFSCSVMHEALHNHYTQKSLSLSGECGGGGSGGGGSEVQLVESGGGLVKPGGSLRLSCAASGFTFSSYDMSWVRQAPGKGLEWVSTISSGGSYTYYLDSIKGRFTISRDNAKNSLYLQMNSLRAEDTAVYYCARQGLDYWGRGTLVTVSSASTGGGGSGGGGSGGGGSGGGGSEIVLTQSPATLSLSPGERATLSCSASSSINYIYWYQQKPGQAPRLLIYLTSNLASGVPARFSGSGSGTDFTLTISSLEPEDFAVYYCLQWSSNPLTFGGGTKVEIK

SEQ ID NO: 363 - protein, 978 aa, Artificial Sequence [sequence omitted]

SEQ ID NO: 364 - protein, 978 aa, Artificial Sequence
  Description of Artificial Sequence: Synthetic polypeptide
EVQLVESGGGLVQPGGSLRLSCAASGYTFTSYWLHWVRQAPGKGLEWVGMIDPSNSDTRFNPNFKDRFTISADTSKNTAYLQMNSLRAEDTAVYYCATYRSYVTPLDYWGQGTLVTVSSASTKGPSVFPLAPSSKSTSGGTAALGCLVKDYFPEPVTVSWNSGALTSGVHTFPAVLQSSGLYSLSSVVTVPSSSLGTQTYICNVNHKPSNTKVDKKVEPKSCDKTHTCPSCPAPEFLGGPSVFLFPPKPKDTLMISRTPEVTCVVVDVSQEDPEVQFNWYVDGVEVHNAKTKPREEQFNSKYRVVSVLTVLHQDWLNGKEYKCKVSNKGLPSSIEKTISKAKGQPREPQVYTLPPSREEMTKNQVSLSCAVKGFYPSDIAVEWESNGQPENNYKTTPPVLDSDGSFFLVSKLTVDKSRWQQGNVFSCSVMHEALHNHYTQKSLSLSKSCDKTGGGGSGGGGSGGGGSGGGGSGGGGSGGGGSGGGGSGGGGSCPSCPAPEFLGGPSVFLFPPKPKDTLMISRTPEVTCVVVDVSQEDPEVQFNWYVDGVEVHNAKTKPREEQFNSDYRVVSVLTVLHQDWLNGKEYKCKVSNKGLPSSIEKTISKAKGQPREPQVYTLPPSREEMTKNQVSLWCLVKGFYPSDIAVEWESNGQPENNYKTTPPVLDSDGSFFLYSKLTVDKSRWQQGNVFSCSVMHEALHNHYTQKSLSLSGECGGGGSGGGGSEVQLVESGGGLVQPGGSLRLSCAASGFDFSRYWMSWVRQAPGKGLVWVGEVNPDSTSINYTPSLKDRFTISRDNAKNTLYLQMNSLRAEDTAVYYCTRPNYYGSRYHYYAMDYWGQGTLVTVSSASTGGGGSGGGGSGGGGSGGGGSDIQMTQSPSSLSASVGDRVTITCRASQDINNYLNWYQQKPGKAPKLLIYYTSRLHSGVPSRFSGSGSGTDFTFTISSLQPEDIATYYCQQGSTLPFTFGQGTKLEIK

SEQ ID NO: 365 - protein, 983 aa, Artificial Sequence
  Description of Artificial Sequence: Synthetic polypeptide
EVQLVESGGGLVQPGGSLRLSCAASGFDFSRYWMSWVRQAPGKGLVWVGEVNPDSTSINYTPSLKDRFTISRDNAKNTLYLQMNSLRAEDTAVYYCTRPNYYGSRYHYYAMDYWGQGTLVTVSSASTKGPSVFPLAPSSKSTSGGTAALGCLVKDYFPEPVTVSWNSGALTSGVHTFPAVLQSSGLYSLSSVVTVPSSSLGTQTYICNVNHKPSNTKVDKKVEPKSCDKTHTCPPCPAPELLGGPSVFLFPPKPKDTLMISRTPEVTCVVVDVSHEDPEVKFNWYVDGVEVHNAKTKPREEQYQSTYRVVSVLTVLHQDWLNGKEYKCKVSNKALPAPIEKTISKAKGQPREPQVYTLPPSREEMTKNQVSLSCAVKGFYPSDIAVEWESNGQPENNYKTTPPVLDSDGSFFLVSKLTVDKSRWQQGNVFSCSVMHEALHNHYTQKSLSLSKSCDKTGGGGSGGGGSGGGGSGGGGSGGGGSGGGGSGGGGSGGGGSCPPCPAPELLGGPSVFLFPPKPKDTLMISRTPEVTCVVVDVSHEDPEVKFNWYVDGVEVHNAKTKPREEQYQSTYRVVSVLTVLHQDWLNGKEYKCKVSNKALPAPIEKTISKAKGQPREPQVYTLPPSREEMTKNQVSLWCLVKGFYPSDIAVEWESNGQPENNYKTTPPVLDSDGSFFLYSKLTVDKSRWQQGNVFSCSVMHEALHNHYTQKSLSLSGECGGGGSGGGGEVQLVESGGGLVQPGGSLRLSCAASGYTFTSYWLHWVRQAPGKGLEWVGMIDPSNSDTRFNPNFKDRFTISADTSKNTAYLQMNSLRAEDTAVYYCATYRSYVTPLDYWGQGTLVTVSSASTGGGGSGGGGSGGGGSGGGGSDIQMTQSPSSLSASVGDRVTITCKSSQSLLYTSSQKNYLAWYQQKPGKAPKLLIYWASTRESGVPSRFSGSGSGTDFTLTISSLQPEDFATYYCQQYYAYPWTFGQGTKVEIK

SEQ ID NO: 366 - protein, 984 aa, Artificial Sequence [sequence omitted]

SEQ ID NO: 367 - protein, 214 aa, Artificial Sequence
  Description of Artificial Sequence: Synthetic polypeptide
DIQMTQSPSSLSASVGDRVTITCRASQDINNYLNWYQQKPGKAPKLLIYYTSRLHSGVPSRFSGSGSGTDFTFTISSLQPEDIATYYCQQGSTLPFTFGQGTKLEIKRTVAAPSVFIFPPSDEQLKSGTASVVCLLNNFYPREAKVQWKVDNALQSGNSQESVTEQDSKDSTYSLSSTLTLSKADYEKHKVYACEVTHQGLSSPVTKSFNRGEC

SEQ ID NO: 368 - protein, 711 aa, Artificial Sequence
  Description of Artificial Sequence: Synthetic polypeptide
EVQLVESGGGLVQPGGSLRLSCAASGYTFTSYWLHWVRQAPGKGLEWVGMIDPSNSDTRFNPNFKDRFTISADTSKNTAYLQMNSLRAEDTAVYYCATYRSYVTPLDYWGQGTLVTVSSASTKGPSVFPLAPSSKSTSGGTAALGCLVKDYFPEPVTVSWNSGALTSGVHTFPAVLQSSGLYSLSSVVTVPSSSLGTQTYICNVNHKPSNTKVDKKVEPKSCDKTHTCPPCPAPELLGGPSVFLFPPKPKDTLMISRTPEVTCVVVDVSHEDPEVKFNWYVDGVEVHNAKTKPREEQYQSTYRVVSVLTVLHQDWLNGKEYKCKVSNKALPAPIEKTISKAKGQPREPQVYTLPPSREEMTKNQVSLSCAVKGFYPSDIAVEWESNGQPENNYKTTPPVLDSDGSFFLVSKLTVDKSRWQQGNVFSCSVMHEALHNHYTQKSLSLSPGKGGGGSGGGGSGGGGSGGGGSGGGGSGGGGSGGGGSGGGGSCPPCPAPELLGGPSVFLFPPKPKDTLMISRTPEVTCVVVDVSHEDPEVKFNWYVDGVEVHNAKTKPREEQYQSTYRVVSVLTVLHQDWLNGKEYKCKVSNKALPAPIEKTISKAKGQPREPQVYTLPPSREEMTKNQVSLWCLVKGFYPSDIAVEWESNGQPENNYKTTPPVLDSDGSFFLYSKLTVDKSRWQQGNVFSCSVMHEALHNHYTQKSLSLSPGK

SEQ ID NO: 369 - DNA, 2139 bp, Artificial Sequence
  Description of Artificial Sequence: Synthetic polynucleotide
gaggtgcagttggtagaatcaggagggggtctggtccaacccggaggaagcctcagactcagctgtgcggcttcgggttacacctttacctcctattggttgcactgggtgagacaggcacctggcaaagggctcgaatgggtcggaatgatcgacccctccaactcagatacgcggtttaacccgaatttcaaggatcgattcacgatctcagcagacacatcgaaaaacacagcgtacctccagatgaattcgttgagggccgaggacacggcggtgtattactgcgccacgtatcgcagctatgtaactccattggattactgggggcagggtactcttgtgacagtctcctcggctagcaccaagggacccagcgtgtttccacttgcgccttcgtcaaagtccacaagcgggggaacggcagcccttggctgcctggtgaaagactactttcccgaacccgtgacagtatcgtggaatagcggagcgctcacatcgggcgtgcacacatttccggcggtgctgcagtcctccgggttgtattcgctgtcgagcgtagtcacggtgccgtcctcgtcactgggaactcagacatacatttgcaacgtcaatcacaaaccgtcaaacacgaaagtcgacaagaaagtggaaccgaaatcatgcgacaagacccacacttgtcccccatgtcctgccccagagcttctcgggggaccctcggtgttcttgttcccgccgaaaccgaaagatactctcatgatcagcagaacacccgaagtcacgtgtgtcgtggtagatgtctcccacgaggaccccgaggtgaagtttaactggtatgtagacggggtagaggtacataatgcgaaaacaaaaccccgcgaagaacagtaccagtcaacttatcgcgtcgtgtcagtactcacggtcttgcatcaggactggttgaacgggaaggagtacaaatgtaaggtatcaaacaaggccctcccagcgccgattgagaaaacgatctcgaaagcgaaaggacagcccagggagccgcaagtatacactcttccgccatcacgggaggagatgactaagaaccaagtcagcctgagctgcgcggtgaaagggttctatccgtcggatattgcggtggaatgggagtcgaacggccagccggagaacaattacaaaaccacgccacccgtcctcgacagcgacggatcgttctttctggtgagcaagttgaccgtcgataagtcgcggtggcaacagggtaatgtgttttcatgctcagtgatgcatgaggccttgcacaatcattacacacagaagtccctcagcctttcgcctggcaaaggtgggggtgggtcgggagggggaggatcaggtggtggagggtcaggaggtgggggatcaggagggggtgggagcgggggaggcgggtccggaggaggcggcagcgggggtgggggctcgtgtcccccttgtccggcacccgagctcttgggaggaccttcagtgtttctttttccgcccaaacccaaagatacccttatgatctcgcgaacccctgaagtcacatgcgtggtcgtggatgtatcgcatgaggacccggaggtcaagttcaattggtacgtggacggggtcgaggtgcacaacgctaagacaaaacctcgggaggagcagtatcagtccacatatagggtcgtgtccgtactgacggtacttcatcaggattggctcaatgggaaagaatacaagtgcaaggtgtcgaataaggcgttgcctgcacccattgaaaagacgatttcgaaagctaagggtcaacccagagaaccccaagtctatacgcttcccccttcccgcgaggaaatgacgaagaatcaggtcagcctctggtgcctggtgaaggggttctacccctccgacatcgccgtagagtgggaatccaatgggcagcccgaaaacaactacaagacgacaccgcctgtgttggattcagatgggagcttctttctctattccaaactgacggtggacaaaagcaggtggcagcaaggaaatgtgttctcgtgctcggtaatgcacgaagcactgcacaaccactacacccagaagtccttgtccctttcgccaggaaaataatag

SEQ ID NO: 370 - protein, 711 aa, Artificial Sequence
  Description of Artificial Sequence: Synthetic polypeptide
EVQLVESGGGLVQPGGSLRLSCAASGYTFTSYWLHWVRQAPGKGLEWVGMIDPSNSDTRFNPNFKDRFTISADTSKNTAYLQMNSLRAEDTAVYYCATYRSYVTPLDYWGQGTLVTVSSASTKGPSVFPLAPSSKSTSGGTAALGCLVKDYFPEPVTVSWNSGALTSGVHTFPAVLQSSGLYSLSSVVTVPSSSLGTQTYICNVNHKPSNTKVDKKVEPKSCDKTHTCPSCPAPEFLGGPSVFLFPPKPKDTLMISRTPEVTCVVVDVSQEDPEVQFNWYVDGVEVHNAKTKPREEQFNSKYRVVSVLTVLHQDWLNGKEYKCKVSNKGLPSSIEKTISKAKGQPREPQVYTLPPSREEMTKNQVSLSCAVKGFYPSDIAVEWESNGQPENNYKTTPPVLDSDGSFFLVSKLTVDKSRWQQGNVFSCSVMHEALHNHYTQKSLSLSPGKGGGGSGGGGSGGGGSGGGGSGGGGSGGGGSGGGGSGGGGSCPSCPAPEFLGGPSVFLFPPKPKDTLMISRTPEVTCVVVDVSQEDPEVQFNWYVDGVEVHNAKTKPREEQFNSKYRVVSVLTVLHQDWLNGKEYKCKVSNKGLPSSIEKTISKAKGQPREPQVYTLPPSREEMTKNQVSLWCLVKGFYPSDIAVEWESNGQPENNYKTTPPVLDSDGSFFLYSKLTVDKSRWQQGNVFSCSVMHEALHNHYTQKSLSLSPGK

SEQ ID NO: 371 - DNA, 2138 bp, Artificial Sequence
  Description of Artificial Sequence: Synthetic polynucleotide
gaggtgcagttggtagaatcaggagggggtctggtccaacccggaggaagcctcagactcagctgtgcggcttcgggttacacctttacctcctattggttgcactgggtgagacaggcacctggcaaagggctcgaatgggtcggaatgatcgacccctccaactcagatacgcggtttaacccgaatttcaaggatcgattcacgatctcagcagacacatcgaaaaacacagcgtacctccagatgaattcgttgagggccgaggacacggcggtgtattactgcgccacgtatcgcagctatgtaactccattggattactgggggcagggtactcttgtgacagtctcctcggctagcaccaagggacccagcgtgtttccacttgcgccttcgtcaaagtccacaagcgggggaacggcagcccttggctgcctggtgaaagactactttcccgaacccgtgacagtatcgtggaatagcggagcgctcacatcgggcgtgcacacatttccggcggtgctgcagtcctccgggttgtattcgctgtcgagcgtagtcacggtgccgtcctcgtcactgggaactcagacatacatttgcaacgtcaatcacaaaccgtcaaacacgaaagtcgacaaaaaggtggaacctaagtcgtgcgacaaaacacacacctgcccgtcgtgtccagcgcctgagttcttgggtggtccctcggtgtttctttttccgcctaagcccaaagacacgctcatgatttcgcgcacacccgaagtcacatgcgtggtggtggatgtgagccaggaagatccggaggtacagttcaattggtatgtcgatggggtggaggtacataatgccaagacgaaaccgagggaggagcagttcaactccaagtatagggtggtgtcagtcttgactgtgttgcaccaagattggcttaacggaaaagagtataagtgtaaagtatcgaacaagggactccccagctcaatcgaaaagacgatctcaaaggcgaaaggtcagccacgagaaccccaagtatacacgctgcctccatcgcgggaagaaatgacgaaaaaccaagtatcgctttcatgcgctgtgaaggggttctacccgtcggacattgccgtggaatgggaaagcaatgggcagccagagaataactataagactacgcccccagtcttggacagcgacgggagctttttcctggtgtccaagttgacagtggacaaatcgcgctggcagcagggaaatgtgttttcctgttccgtaatgcatgaagcactccataatcactacacacagaaatcgctttcgctgtcacccgggaagggtgggggtgggtcgggagggggaggatcaggtggtggagggtcaggaggtgggggatcaggagggggtgggagcgggggaggcgggtccggaggaggcggcagcgggggtgggggctcgtgcccttcctgtcccgcacccgagttccttgggggaccgtcggtctttctcttccctccgaagcccaaggacaccttgatgatctcccggactcccgaagtgacgtgtgtcgtagtagacgtgtcgcaagaggaccccgaggtccagttcaactggtacgtcgatggcgtggaggtgcacaacgctaaaacaaagcccagagaagagcagtttaacagcaagtatcgggtcgtcagcgtgctgaccgtccttcatcaggactggcttaatggaaaggaatacaaatgtaaagtctcgaataaggggttgcccagctcgattgagaaaaccatctccaaagcgaaagggcagccaagagagcctcaagtctatacgcttcccccatcacgcgaagagatgactaagaatcaagtctccctgtggtgcctggtgaagggattctacccttcggatattgcggtggagtgggagtccaacggtcagccggagaacaattacaagacgactccgccggtactcgattcagatggatcattctttctctactccaaactcacagtagacaaatcgaggtggcaacagggaaacgtcttttcatgttcggtaatgcacgaggcccttcacaatcattacacccagaaatcactcagcctgtccccgggaaataatag

SEQ ID NO: 372 - protein, 714 aa, Artificial Sequence
  Description of Artificial Sequence: Synthetic polypeptide
EVQLVESGGGLVQPGGSLRLSCAASGYTFTSYWLHWVRQAPGKGLEWVGMIDPSNSDTRFNPNFKDRFTISADTSKNTAYLQMNSLRAEDTAVYYCATYRSYVTPLDYWGQGTLVTVSSASTKGPSVFPLAPSSKSTSGGTAALGCLVKDYFPEPVTVSWNSGALTSGVHTFPAVLQSSGLYSLSSVVTVPSSSLGTQTYICNVNHKPSNTKVDKKVEPKSCDKTHTCPPCPAPELLGGPSVFLFPPKPKDTLMISRTPEVTCVVVDVSHEDPEVKFNWYVDGVEVHNAKTKPREEQYQSTYRVVSVLTVLHQDWLNGKEYKCKVSNKALPAPIEKTISKAKGQPREPQVYTLPPSREEMTKNQVSLSCAVKGFYPSDIAVEWESNGQPENNYKTTPPVLDSDGSFFLVSKLTVDKSRWQQGNVFSCSVMHEALHNHYTQKSLSLSKSCDKTGGGGSGGGGSGGGGSGGGGSGGGGSGGGGSGGGGSGGGGSCPPCPAPELLGGPSVFLFPPKPKDTLMISRTPEVTCVVVDVSHEDPEVKFNWYVDGVEVHNAKTKPREEQYQSTYRVVSVLTVLHQDWLNGKEYKCKVSNKALPAPIEKTISKAKGQPREPQVYTLPPSREEMTKNQVSLWCLVKGFYPSDIAVEWESNGQPENNYKTTPPVLDSDGSFFLYSKLTVDKSRWQQGNVFSCSVMHEALHNHYTQKSLSLSGEC

SEQ ID NO: 373 - DNA, 2151 bp, Artificial Sequence
  Description of Artificial Sequence: Synthetic polynucleotide
gaggtgcagttggtagaatcaggagggggtctggtccaacccggaggaagcctcagactcagctgtgcggcttcgggttacacctttacctcctattggttgcactgggtgagacaggcacctggcaaagggctcgaatgggtcggaatgatcgacccctccaactcagatacgcggtttaacccgaatttcaaggatcgattcacgatctcagcagacacatcgaaaaacacagcgtacctccagatgaattcgttgagggccgaggacacggcggtgtattactgcgccacgtatcgcagctatgtaactccattggattactgggggcagggtactcttgtgacagtctcctcggctagcactaaggggcccagcgtctttccattggcgccctcgtcgaaatcaaccagcggaggaacagctgcgcttggttgcctcgtcaaagactacttccccgagccggtaacggtgtcgtggaactccggtgcgctgacatcaggggtgcacacgttccctgctgtccttcagtcaagcgggttgtactcgctctcgtccgtggtgacggtgccctccagctcgttgggcacgcagacttacatctgcaatgtgaaccataaacccagcaacactaaagtcgacaaaaaggtcgaaccaaaatcgtgcgataagacgcacacctgcccaccttgtccggctccggaactcttgggtggtccgtccgtattcttgttcccgcctaagccgaaggacactcttatgatttcgaggaccccggaggtcacgtgcgtcgtggtggatgtctcgcatgaggacccggaagtcaaattcaactggtacgtagacggtgtcgaggtgcataacgcaaagaccaagcccagggaagagcagtaccagtccacgtaccgggtagtgtcggtgctcaccgtgcttcaccaggactggcttaacgggaaggaatacaagtgtaaagtctccaacaaagcgctccctgcccccatcgaaaagaccatttcgaaagcgaaagggcagccacgcgagcctcaagtgtacaccctgccgccgtcccgggaagagatgactaagaatcaggtatccctctcatgcgctgtcaagggtttctacccgtcagacatcgcagtggaatgggaatcaaacggccagccggagaataactacaagacgacgccgcctgtcctcgattccgacgggtcgttcttcctggtgtcgaagttgacagtggacaagtcgcgatggcagcaaggaaacgtcttctcatgctcggtaatgcacgaggcgctccataaccactatacacagaaatcgctctccttgtcaaagtcgtgcgataagacgggagggggtggatcaggtgggggaggctcgggagggggaggaagcggtggaggagggtcaggaggaggaggcagcgggggcggtggttccggtggtgggggatcaggcggaggcggctcatgcccgccttgtcccgcaccagaactgcttggagggccttcggtctttctctttcccccgaaacccaaagacaccctgatgatctcacgcactcccgaagtcacatgtgtagtcgtcgatgtgtcgcatgaagatccggaggtgaagttcaattggtacgtagatggggtcgaagtgcataatgcaaagacgaaaccgcgagaggagcagtatcagtcaacgtatcgcgtagtaagcgtgttgacggtgctccatcaggattggttgaatggtaaagagtacaagtgcaaggtgtcaaacaaagcgttgccggcccctattgaaaagaccatctcaaaagccaaggggcaaccccgagagccccaagtatacactctcccgccttcgagagaggagatgactaaaaaccaggtgtcgctttggtgtttggtgaaggggttctatccctcggatatcgccgtcgagtgggaatccaatgggcaacccgaaaacaactataagacaacgcctccagtactggactccgacggctcctttttcttgtactccaaattgacggtggataagtcgcggtggcagcaggggaatgtgttttcgtgtagcgtgatgcatgaagccctgcataaccactatactcaaaagtcactttccctgtcgggtgaatgctgataatct

SEQ ID NO: 374 - protein, 714 aa, Artificial Sequence
  Description of Artificial Sequence: Synthetic polypeptide
EVQLVESGGGLVQPGGSLRLSCAASGYTFTSYWLHWVRQAPGKGLEWVGMIDPSNSDTRFNPNFKDRFTISADTSKNTAYLQMNSLRAEDTAVYYCATYRSYVTPLDYWGQGTLVTVSSASTKGPSVFPLAPSSKSTSGGTAALGCLVKDYFPEPVTVSWNSGALTSGVHTFPAVLQSSGLYSLSSVVTVPSSSLGTQTYICNVNHKPSNTKVDKKVEPKSCDKTHTCPSCPAPEFLGGPSVFLFPPKPKDTLMISRTPEVTCVVVDVSQEDPEVQFNWYVDGVEVHNAKTKPREEQFNSKYRVVSVLTVLHQDWLNGKEYKCKVSNKGLPSSIEKTISKAKGQPREPQVYTLPPSREEMTKNQVSLSCAVKGFYPSDIAVEWESNGQPENNYKTTPPVLDSDGSFFLVSKLTVDKSRWQQGNVFSCSVMHEALHNHYTQKSLSLSKSCDKTGGGGSGGGGSGGGGSGGGGSGGGGSGGGGSGGGGSGGGGSCPSCPAPEFLGGPSVFLFPPKPKDTLMISRTPEVTCVVVDVSQEDPEVQFNWYVDGVEVHNAKTKPREEQFNSDYRVVSVLTVLHQDWLNGKEYKCKVSNKGLPSSIEKTISKAKGQPREPQVYTLPPSREEMTKNQVSLWCLVKGFYPSDIAVEWESNGQPENNYKTTPPVLDSDGSFFLYSKLTVDKSRWQQGNVFSCSVMHEALHNHYTQKSLSLSGEC

SEQ ID NO: 375 - DNA, 2160 bp, Artificial Sequence
  Description of Artificial Sequence: Synthetic polynucleotide
gaggtgcagttggtagaatcaggagggggtctggtccaacccggaggaagcctcagactcagctgtgcggcttcgggttacacctttacctcctattggttgcactgggtgagacaggcacctggcaaagggctcgaatgggtcggaatgatcgacccctccaactcagatacgcggtttaacccgaatttcaaggatcgattcacgatctcagcagacacatcgaaaaacacagcgtacctccagatgaattcgttgagggccgaggacacggcggtgtattactgcgccacgtatcgcagctatgtaactccattggattactgggggcagggtactcttgtgacagtctcctcggctagcactaagggaccttccgtgttcccactggccccctcaagcaaatctaccagtgggggaacagcagccctgggctgtctggtgaaggattactttccagagcccgtgaccgtcagttggaactcaggggctctgactagcggagtgcacaccttccccgcagtcctgcagtcctctgggctgtactccctgagttcagtggtcactgtgcccagctcctctctgggaacacagacttatatctgcaacgtgaatcacaagccttccaataccaaagtcgacaagaaagtcgagcctaagtcatgtgataaaacccatacatgcccaagctgtcctgcaccagaatttctgggaggaccaagcgtgttcctgtttccacctaagcctaaagacaccctgatgattagtcgcactccagaggtgacctgtgtggtcgtggacgtcagccaggaggatcccgaagtgcagtttaactggtacgtcgatggcgtggaagtccacaatgctaagacaaaaccaagagaggaacagttcaacagcaagtacagggtcgtgtccgtgctgactgtcctgcatcaggactggctgaacggaaaagagtataagtgcaaagtgagcaataagggcctgcccagttcaatcgagaaaacaatttccaaggcaaaaggccagcctcgggaaccacaggtgtataccctgccacccagcagagaggaaatgacaaagaaccaggtgtcactgagctgtgccgtcaaaggcttttaccctagcgatatcgctgtggagtgggaatccaatgggcagccagaaaacaattataagaccacacctccagtgctggacagcgatggatccttctttctggtgtccaagctgaccgtggacaaatctcggtggcagcagggcaacgtgttctcctgctctgtcatgcatgaggccctgcacaatcattacacccagaaaagtctgtcactgagcaagtcctgtgataaaacaggaggcgggggatctggcgggggaggcagtgggggaggcgggtccggaggaggaggaagcggaggaggaggatccggaggaggcgggtctggaggcgggggaagtggaggaggaggatcttgcccaagttgtccagcacctgagttcctgggaggaccatccgtgttcctgtttccccctaagcccaaagacaccctgatgatcagccggacacctgaagtgacttgcgtcgtggtggacgtgtcccaggaggatccagaggtccagtttaactggtatgtcgatggcgtggaggtccacaatgctaagaccaaacctcgcgaggaacagttcaactctgactaccgagtggtcagtgtgctgacagtcctgcatcaggattggctgaacgggaaggaatacaaatgtaaagtgagcaataagggactgccaagctccatcgagaagaccatcagcaaagccaaaggccagcccagggaacctcaggtgtacactctgccaccctcccgcgaggaaatgaccaagaaccaggtgtctctgtggtgtctggtcaaaggattttatccctctgacatcgccgtggagtgggaaagtaatggccagcctgaaaacaattacaagactacccctccagtgctggactcagatgggagcttctttctgtatagtaagctgaccgtggataaatcacggtggcagcagggaaatgtgttctcttgcagtgtcatgcacgaggccctgcataaccattacacacagaagtcattaagcttatccggagagtgttgataatctagactcgag

SEQ ID NO: 376 - protein, 973 aa, Artificial Sequence
  Description of Artificial Sequence: Synthetic polypeptide
EVQLVESGGGLVQPGGSLRLSCAASGYTFTSYWLHWVRQAPGKGLEWVGMIDPSNSDTRFNPNFKDRFTISADTSKNTAYLQMNSLRAEDTAVYYCATYRSYVTPLDYWGQGTLVTVSSASTKGPSVFPLAPSSKSTSGGTAALGCLVKDYFPEPVTVSWNSGALTSGVHTFPAVLQSSGLYSLSSVVTVPSSSLGTQTYICNVNHKPSNTKVDKKVEPKSCDKTHTCPPCPAPELLGGPSVFLFPPKPKDTLMISRTPEVTCVVVDVSHEDPEVKFNWYVDGVEVHNAKTKPREEQYQSTYRVVSVLTVLHQDWLNGKEYKCKVSNKALPAPIEKTISKAKGQPREPQVYTLPPSREEMTKNQVSLSCAVKGFYPSDIAVEWESNGQPENNYKTTPPVLDSDGSFFLVSKLTVDKSRWQQGNVFSCSVMHEALHNHYTQKSLSLSKSCDKTGGGGSGGGGSGGGGSGGGGSGGGGSGGGGSGGGGSGGGGSCPPCPAPELLGGPSVFLFPPKPKDTLMISRTPEVTCVVVDVSHEDPEVKFNWYVDGVEVHNAKTKPREEQYQSTYRVVSVLTVLHQDWLNGKEYKCKVSNKALPAPIEKTISKAKGQPREPQVYTLPPSREEMTKNQVSLWCLVKGFYPSDIAVEWESNGQPENNYKTTPPVLDSDGSFFLYSKLTVDKSRWQQGNVFSCSVMHEALHNHYTQKSLSLSGECGGGGSGGGGSQVQLVESGGGVVQPGESLRISCAVSGFSLTNYGVHWVRQAPGKGLEWLGVIWSGGNTDYNTPFTSRLTISKDNSKSTVYFQMNSLRAEDTAVYYCARALTYYDYEFAYWGQGTLVTVSSASTGGGGSGGGGSGGGGSGGGGSDIVLTQSPSSLSVTPGEKVTFTCRASQSIGTNIHWYQQKPGQSPKLLIKYASESISGVPSRFSGSGSGTDFTLTINSVEAEDAATYYCQQNNNWPTTFGQGTKLEIK

SEQ ID NO: 377 - DNA, 2925 bp, Artificial Sequence
  Description of Artificial Sequence: Synthetic polynucleotide
gaggtgcagttggtagaatcaggagggggtctggtccaacccggaggaagcctcagactcagctgtgcggcttcgggttacacctttacctcctattggttgcactgggtgagacaggcacctggcaaagggctcgaatgggtcggaatgatcgacccctccaactcagatacgcggtttaacccgaatttcaaggatcgattcacgatctcagcagacacatcgaaaaacacagcgtacctccagatgaattcgttgagggccgaggacacggcggtgtattactgcgccacgtatcgcagctatgtaactccattggattactgggggcagggtactcttgtgacagtctcctcggctagcactaaggggcccagcgtctttccattggcgccctcgtcgaaatcaaccagcggaggaacagctgcgcttggttgcctcgtcaaagactacttccccgagccggtaacggtgtcgtggaactccggtgcgctgacatcaggggtgcacacgttccctgctgtccttcagtcaagcgggttgtactcgctctcgtccgtggtgacggtgccctccagctcgttgggcacgcagacttacatctgcaatgtgaaccataaacccagcaacactaaagtcgacaaaaaggtcgaaccaaaatcgtgcgataagacgcacacctgcccaccttgtccggctccggaactcttgggtggtccgtccgtattcttgttcccgcctaagccgaaggacactcttatgatttcgaggaccccggaggtcacgtgcgtcgtggtggatgtctcgcatgaggacccggaagtcaaattcaactggtacgtagacggtgtcgaggtgcataacgcaaagaccaagcccagggaagagcagtaccagtccacgtaccgggtagtgtcggtgctcaccgtgcttcaccaggactggcttaacgggaaggaatacaagtgtaaagtctccaacaaagcgctccctgcccccatcgaaaagaccatttcgaaagcgaaagggcagccacgcgagcctcaagtgtacaccctgccgccgtcccgggaagagatgactaagaatcaggtatccctctcatgcgctgtcaagggtttctacccgtcagacatcgcagtggaatgggaatcaaacggccagccggagaataactacaagacgacgccgcctgtcctcgattccgacgggtcgttcttcctggtgtcgaagttgacagtggacaagtcgcgatggcagcaaggaaacgtcttctcatgctcggtaatgcacgaggcgctccataaccactatacacagaaatcgctctccttgtcaaagtcgtgcgataagacgggagggggtggatcaggtgggggaggctcgggagggggaggaagcggtggaggagggtcaggaggaggaggcagcgggggcggtggttccggtggtgggggatcaggcggaggcggctcatgcccgccttgtcccgcaccagaactgcttggagggccttcggtctttctctttcccccgaaacccaaagacaccctgatgatctcacgcactcccgaagtcacatgtgtagtcgtcgatgtgtcgcatgaagatccggaggtgaagttcaattggtacgtagatggggtcgaagtgcataatgcaaagacgaaaccgcgagaggagcagtatcagtcaacgtatcgcgtagtaagcgtgttgacggtgctccatcaggattggttgaatggtaaagagtacaagtgcaaggtgtcaaacaaagcgttgccggcccctattgaaaagaccatctcaaaagccaaggggcaaccccgagagccccaagtatacactctcccgccttcgagagaggagatgactaaaaaccaggtgtcgctttggtgtttggtgaaggggttctatccctcggatatcgccgtcgagtgggaatccaatgggcaacccgaaaacaactataagacaacgcctccagtactggactccgacggctcctttttcttgtactccaaattgacggtggataagtcgcggtggcagcaggggaatgtgttttcgtgtagcgtgatgcatgaagccctgcataaccactatactcaaaagtcactttccctgtcgggtgaatgcggcggaggtgggtccgggggtgggggatcccaggtgcagctggtggagtctggaggaggagtggtgcagccaggagaatccctgaggatttcttgtgccgtgtcaggcttcagcctgactaattacggggtgcactgggtgcgccaggctccaggcaaagggctggagtggctgggcgtgatctggtccggagggaatacagactacaacacccctttcacaagtaggctgaccatttcaaaggataactcaaaaagcacagtgtatttccagatgaacagcctgcgggccgaggacacagccgtgtactattgcgccagagctctgacttactatgattacgaattcgcctattggggacagggcactctggtgaccgtgagcagcgccagcaccggaggaggaggaagcggcggaggaggctccggaggaggcgggtctggaggcgggggaagtgacatcgtgctgactcagtcaccatctagtctgagcgtgacccccggcgagaaagtgacttttacctgccgggcctcccagtctatcggaaccaatattcattggtatcagcagaaacccggccagtcccctaagctgctgatcaaatatgctagtgaatcaattagcggcgtgcccagccggttcagcgggtctggaagtggcaccgactttacactgactatcaacagtgtggaggccgaagatgccgctacatactattgtcagcagaacaataactggcctaccacatttgggcagggaacaaagctggagatcaagtgataa

SEQ ID NO: 378 - protein, 974 aa, Artificial Sequence [sequence omitted]

SEQ ID NO: 379 - DNA, 2928 bp, Artificial Sequence
  Description of Artificial Sequence: Synthetic polynucleotide
gaggtgcagttggtagaatcaggagggggtctggtccaacccggaggaagcctcagactcagctgtgcggcttcgggttacacctttacctcctattggttgcactgggtgagacaggcacctggcaaagggctcgaatgggtcggaatgatcgacccctccaactcagatacgcggtttaacccgaatttcaaggatcgattcacgatctcagcagacacatcgaaaaacacagcgtacctccagatgaattcgttgagggccgaggacacggcggtgtattactgcgccacgtatcgcagctatgtaactccattggattactgggggcagggtactcttgtgacagtctcctcggctagcactaaggggcccagcgtctttccattggcgccctcgtcgaaatcaaccagcggaggaacagctgcgcttggttgcctcgtcaaagactacttccccgagccggtaacggtgtcgtggaactccggtgcgctgacatcaggggtgcacacgttccctgctgtccttcagtcaagcgggttgtactcgctctcgtccgtggtgacggtgccctccagctcgttgggcacgcagacttacatctgcaatgtgaaccataaacccagcaacactaaagtcgacaaaaaggtcgaaccaaaatcgtgcgataagacgcacacctgcccaccttgtccggctccggaactcttgggtggtccgtccgtattcttgttcccgcctaagccgaaggacactcttatgatttcgaggaccccggaggtcacgtgcgtcgtggtggatgtctcgcatgaggacccggaagtcaaattcaactggtacgtagacggtgtcgaggtgcataacgcaaagaccaagcccagggaagagcagtaccagtccacgtaccgggtagtgtcggtgctcaccgtgcttcaccaggactggcttaacgggaaggaatacaagtgtaaagtctccaacaaagcgctccctgcccccatcgaaaagaccatttcgaaagcgaaagggcagccacgcgagcctcaagtgtacaccctgccgccgtcccgggaagagatgactaagaatcaggtatccctctcatgcgctgtcaagggtttctacccgtcagacatcgcagtggaatgggaatcaaacggccagccggagaataactacaagacgacgccgcctgtcctcgattccgacgggtcgttcttcctggtgtcgaagttgacagtggacaagtcgcgatggcagcaaggaaacgtcttctcatgctcggtaatgcacgaggcgctccataaccactatacacagaaatcgctctccttgtcaaagtcgtgcgataagacgggagggggtggatcaggtgggggaggctcgggagggggaggaagcggtggaggagggtcaggaggaggaggcagcgggggcggtggttccggtggtgggggatcaggcggaggcggctcatgcccgccttgtcccgcaccagaactgcttggagggccttcggtctttctctttcccccgaaacccaaagacaccctgatgatctcacgcactcccgaagtcacatgtgtagtcgtcgatgtgtcgcatgaagatccggaggtgaagttcaattggtacgtagatggggtcgaagtgcataatgcaaagacgaaaccgcgagaggagcagtatcagtcaacgtatcgcgtagtaagcgtgttgacggtgctccatcaggattggttgaatggtaaagagtacaagtgcaaggtgtcaaacaaagcgttgccggcccctattgaaaagaccatctcaaaagccaaggggcaaccccgagagccccaagtatacactctcccgccttcgagagaggagatgactaaaaaccaggtgtcgctttggtgtttggtgaaggggttctatccctcggatatcgccgtcgagtgggaatccaatgggcaacccgaaaacaactataagacaacgcctccagtactggactccgacggctcctttttcttgtactccaaattgacggtggataagtcgcggtggcagcaggggaatgtgttttcgtgtagcgtgatgcatgaagccctgcataaccactatactcaaaagtcactttccctgtcgggtgaatgcggcggaggtgggtccgggggtgggggatcccaagtccagttgcaagaaagcgggccaggactcgtgaaaccctcggaaaccctgtcactgacgtgcacggtgagcggagggtccgtgtcgagcggagattactattggacttggattagacagtcgcccggaaaaggtctggagtggatcggacacatctactactcggggaatacgaattacaacccgtcgttgaaatcacggctcacgattagcatcgatacctccaagacgcagttctcgctcaaacttagctccgtaactgcggccgacaccgcaatctactattgtgtacgcgaccgcgtcacaggggcttttgacatttggggtcagggcactatggtgacctcgtcagcgtcgacaggtggtgggggatcaggaggaggtggctccgggggaggcggaagcggcggtgggggctccgacatccagatgacgcagtcgccctcatcattgtcagcatcagtcggggacagggtcactattacttgtcaggccagccaagatatctcgaactatctgaactggtatcagcagaagcctggaaaagcgcctaagctccttatctatgatgcgtccaatcttgagacaggggtgccgtcgcggttttccggttcagggtcgggaacggacttcacgtttacaatctccagcctgcagccggaggacgaagccacctacttctgccaacacttcgaccatttgcctcttgcgttcggaggtgggacaaaggtggagatcaagcgaacttgataa

SEQ ID NO: 380 - protein, 981 aa, Artificial Sequence
  Description of Artificial Sequence: Synthetic polypeptide
EVQLVESGGGLVQPGGSLRLSCAASGYTFTSYWLHWVRQAPGKGLEWVGMIDPSNSDTRFNPNFKDRFTISADTSKNTAYLQMNSLRAEDTAVYYCATYRSYVTPLDYWGQGTLVTVSSASTKGPSVFPLAPSSKSTSGGTAALGCLVKDYFPEPVTVSWNSGALTSGVHTFPAVLQSSGLYSLSSVVTVPSSSLGTQTYICNVNHKPSNTKVDKKVEPKSCDKTHTCPPCPAPELLGGPSVFLFPPKPKDTLMISRTPEVTCVVVDVSHEDPEVKFNWYVDGVEVHNAKTKPREEQYQSTYRVVSVLTVLHQDWLNGKEYKCKVSNKALPAPIEKTISKAKGQPREPQVYTLPPSREEMTKNQVSLSCAVKGFYPSDIAVEWESNGQPENNYKTTPPVLDSDGSFFLVSKLTVDKSRWQQGNVFSCSVMHEALHNHYTQKSLSLSKSCDKTGGGGSGGGGSGGGGSGGGGSGGGGSGGGGSGGGGSGGGGSCPPCPAPELLGGPSVFLFPPKPKDTLMISRTPEVTCVVVDVSHEDPEVKFNWYVDGVEVHNAKTKPREEQYQSTYRVVSVLTVLHQDWLNGKEYKCKVSNKALPAPIEKTISKAKGQPREPQVYTLPPSREEMTKNQVSLWCLVKGFYPSDIAVEWESNGQPENNYKTTPPVLDSDGSFFLYSKLTVDKSRWQQGNVFSCSVMHEALHNHYTQKSLSLSGECGGGGSGGGGSEVQLVQSGAEVKKPGSSVKVSCKASGGTFSSYAIGWVRQAPGQGLEWMGGIIPIFGIANYAQKFQGRVTITADESTSSAYMELSSLRSEDTAVYYCAREEGPYCSSTSCYAAFDIWGQGTLVTVSSASTGGGGSGGGGSGGGGSGGGGSQSVLTQDPAVSVALGQTVKITCQGDSLRSYFASWYQQKPGQAPTLVMYARNDRPAGVPDRFSGSKSGTSASLAISGLQPEDEADYYCAAWDDSLNGYLFGAGTKLTVL

SEQ ID NO: 381 - DNA, 2949 bp, Artificial Sequence
  Description of Artificial Sequence: Synthetic polynucleotide
gaggtgcagttggtagaatcaggagggggtctggtccaacccggaggaagcctcagactcagctgtgcggcttcgggttacacctttacctcctattggttgcactgggtgagacaggcacctggcaaagggctcgaatgggtcggaatgatcgacccctccaactcagatacgcggtttaacccgaatttcaaggatcgattcacgatctcagcagacacatcgaaaaacacagcgtacctccagatgaattcgttgagggccgaggacacggcggtgtattactgcgccacgtatcgcagctatgtaactccattggattactgggggcagggtactcttgtgacagtctcctcggctagcactaaggggcccagcgtctttccattggcgccctcgtcgaaatcaaccagcggaggaacagctgcgcttggttgcctcgtcaaagactacttccccgagccggtaacggtgtcgtggaactccggtgcgctgacatcaggggtgcacacgttccctgctgtccttcagtcaagcgggttgtactcgctctcgtccgtggtgacggtgccctccagctcgttgggcacgcagacttacatctgcaatgtgaaccataaacccagcaacactaaagtcgacaaaaaggtcgaaccaaaatcgtgcgataagacgcacacctgcccaccttgtccggctccggaactcttgggtggtccgtccgtattcttgttcccgcctaagccgaaggacactcttatgatttcgaggaccccggaggtcacgtgcgtcgtggtggatgtctcgcatgaggacccggaagtcaaattcaactggtacgtagacggtgtcgaggtgcataacgcaaagaccaagcccagggaagagcagtaccagtccacgtaccgggtagtgtcggtgctcaccgtgcttcaccaggactggcttaacgggaaggaatacaagtgtaaagtctccaacaaagcgctccctgcccccatcgaaaagaccatttcgaaagcgaaagggcagccacgcgagcctcaagtgtacaccctgccgccgtcccgggaagagatgactaagaatcaggtatccctctcatgcgctgtcaagggtttctacccgtcagacatcgcagtggaatgggaatcaaacggccagccggagaataactacaagacgacgccgcctgtcctcgattccgacgggtcgttcttcctggtgtcgaagttgacagtggacaagtcgcgatggcagcaaggaaacgtcttctcatgctcggtaatgcacgaggcgctccataaccactatacacagaaatcgctctccttgtcaaagtcgtgcgataagacgggagggggtggatcaggtgggggaggctcgggagggggaggaagcggtggaggagggtcaggaggaggaggcagcgggggcggtggttccggtggtgggggatcaggcggaggcggctcatgcccgccttgtcccgcaccagaactgcttggagggccttcggtctttctctttcccccgaaacccaaagacaccctgatgatctcacgcactcccgaagtcacatgtgtagtcgtcgatgtgtcgcatgaagatccggaggtgaagttcaattggtacgtagatggggtcgaagtgcataatgcaaagacgaaaccgcgagaggagcagtatcagtcaacgtatcgcgtagtaagcgtgttgacggtgctccatcaggattggttgaatggtaaagagtacaagtgcaaggtgtcaaacaaagcgttgccggcccctattgaaaagaccatctcaaaagccaaggggcaaccccgagagccccaagtatacactctcccgccttcgagagaggagatgactaaaaaccaggtgtcgctttggtgtttggtgaaggggttctatccctcggatatcgccgtcgagtgggaatccaatgggcaacccgaaaacaactataagacaacgcctccagtactggactccgacggctcctttttcttgtactccaaattgacggtggataagtcgcggtggcagcaggggaatgtgttttcgtgtagcgtgatgcatgaagccctgcataaccactatactcaaaagtcactttccctgtcgggtgaatgcggcggaggtgggtccgggggtgggggttcggaggtacagctcgtccagagcggcgcagaggtcaagaaaccgggatcaagcgtcaaagtgtcatgtaaagcatcgggtgggaccttttcatcctatgcgattggttgggtccgacaagcgcctggacaggggcttgaatggatgggtggtatcatcccgattttcggaatcgccaactacgcacaaaagtttcaggggagagtgacaattacagccgatgagtcaacgtcctcagcctatatggaactctcatccctgcgcagcgaggacactgcggtctattactgtgcgcgggaagaggggccctactgctcgtcgacctcgtgctacgcggcgtttgatatctggggccagggcaccctcgtgacggtatcgtccgcgtcaacagggggtgggggttcgggcggaggaggatcgggaggaggtggatcgggtggtgggggatcacagtcagtcctgacgcaagacccagcggtatcggtggcccttggacagacagtaaagatcacgtgtcaaggggattcgttgaggtcctacttcgccagctggtatcagcagaagcccggacaggcgcccactcttgtgatgtacgcacgcaacgaccggcctgctggagtgcccgacagattctcggggtcgaaaagcggaacttcagcgtcgttggcaatttccggccttcagccggaggacgaggcggattactactgcgctgcctgggatgactcattgaatgggtatctcttcggtgcggggacgaagttgacggtgctgtgataa

SEQ ID NO: 382 - protein, 973 aa, Artificial Sequence
  Description of Artificial Sequence: Synthetic polypeptide
EVQLVESGGGLVQPGGSLRLSCAASGYTFTSYWLHWVRQAPGKGLEWVGMIDPSNSDTRFNPNFKDRFTISADTSKNTAYLQMNSLRAEDTAVYYCATYRSYVTPLDYWGQGTLVTVSSASTKGPSVFPLAPSSKSTSGGTAALGCLVKDYFPEPVTVSWNSGALTSGVHTFPAVLQSSGLYSLSSVVTVPSSSLGTQTYICNVNHKPSNTKVDKKVEPKSCDKTHTCPSCPAPEFLGGPSVFLFPPKPKDTLMISRTPEVTCVVVDVSQEDPEVQFNWYVDGVEVHNAKTKPREEQFNSKYRVVSVLTVLHQDWLNGKEYKCKVSNKGLPSSIEKTISKAKGQPREPQVYTLPPSREEMTKNQVSLSCAVKGFYPSDIAVEWESNGQPENNYKTTPPVLDSDGSFFLVSKLTVDKSRWQQGNVFSCSVMHEALHNHYTQKSLSLSKSCDKTGGGGSGGGGSGGGGSGGGGSGGGGSGGGGSGGGGSGGGGSCPSCPAPEFLGGPSVFLFPPKPKDTLMISRTPEVTCVVVDVSQEDPEVQFNWYVDGVEVHNAKTKPREEQFNSDYRVVSVLTVLHQDWLNGKEYKCKVSNKGLPSSIEKTISKAKGQPREPQVYTLPPSREEMTKNQVSLWCLVKGFYPSDIAVEWESNGQPENNYKTTPPVLDSDGSFFLYSKLTVDKSRWQQGNVFSCSVMHEALHNHYTQKSLSLSGECGGGGSGGGGSQVQLVESGGGVVQPGESLRISCAVSGFSLTNYGVHWVRQAPGKGLEWLGVIWSGGNTDYNTPFTSRLTISKDNSKSTVYFQMNSLRAEDTAVYYCARALTYYDYEFAYWGQGTLVTVSSASTGGGGSGGGGSGGGGSGGGGSDIVLTQSPSSLSVTPGEKVTFTCRASQSIGTNIHWYQQKPGQSPKLLIKYASESISGVPSRFSGSGSGTDFTLTINSVEAEDAATYYCQQNNNWPTTFGQGTKLEIK

SEQ ID NO: 383 - DNA, 2925 bp, Artificial Sequence
  Description of Artificial Sequence: Synthetic polynucleotide
gaggtgcagttggtagaatcaggagggggtctggtccaacccggaggaagcctcagactcagctgtgcggcttcgggttacacctttacctcctattggttgcactgggtgagacaggcacctggcaaagggctcgaatgggtcggaatgatcgacccctccaactcagatacgcggtttaacccgaatttcaaggatcgattcacgatctcagcagacacatcgaaaaacacagcgtacctccagatgaattcgttgagggccgaggacacggcggtgtattactgcgccacgtatcgcagctatgtaactccattggattactgggggcagggtactcttgtgacagtctcctcggctagcactaagggaccttccgtgttcccactggccccctcaagcaaatctaccagtgggggaacagcagccctgggctgtctggtgaaggattactttccagagcccgtgaccgtcagttggaactcaggggctctgactagcggagtgcacaccttccccgcagtcctgcagtcctctgggctgtactccctgagttcagtggtcactgtgcccagctcctctctgggaacacagacttatatctgcaacgtgaatcacaagccttccaataccaaagtcgacaagaaagtcgagcctaagtcatgtgataaaacccatacatgcccaagctgtcctgcaccagaatttctgggaggaccaagcgtgttcctgtttccacctaagcctaaagacaccctgatgattagtcgcactccagaggtgacctgtgtggtcgtggacgtcagccaggaggatcccgaagtgcagtttaactggtacgtcgatggcgtggaagtccacaatgctaagacaaaaccaagagaggaacagttcaacagcaagtacagggtcgtgtccgtgctgactgtcctgcatcaggactggctgaacggaaaagagtataagtgcaaagtgagcaataagggcctgcccagttcaatcgagaaaacaatttccaaggcaaaaggccagcctcgggaaccacaggtgtataccctgccacccagcagagaggaaatgacaaagaaccaggtgtcactgagctgtgccgtcaaaggcttttaccctagcgatatcgctgtggagtgggaatccaatgggcagccagaaaacaattataagaccacacctccagtgctggacagcgatggatccttctttctggtgtccaagctgaccgtggacaaatctcggtggcagcagggcaacgtgttctcctgctctgtcatgcatgaggccctgcacaatcattacacccagaaaagtctgtcactgagcaagtcctgtgataaaacaggaggcgggggatctggcgggggaggcagtgggggaggcgggtccggaggaggaggaagcggaggaggaggatccggaggaggcgggtctggaggcgggggaagtggaggaggaggatcttgcccaagttgtccagcacctgagttcctgggaggaccatccgtgttcctgtttccccctaagcccaaagacaccctgatgatcagccggacacctgaagtgacttgcgtcgtggtggacgtgtcccaggaggatccagaggtccagtttaactggtatgtcgatggcgtggaggtccacaatgctaagaccaaacctcgcgaggaacagttcaactctgactaccgagtggtcagtgtgctgacagtcctgcatcaggattggctgaacgggaaggaatacaaatgtaaagtgagcaataagggactgccaagctccatcgagaagaccatcagcaaagccaaaggccagcccagggaacctcaggtgtacactctgccaccctcccgcgaggaaatgaccaagaaccaggtgtctctgtggtgtctggtcaaaggattttatccctctgacatcgccgtggagtgggaaagtaatggccagcctgaaaacaattacaagactacccctccagtgctggactcagatgggagcttctttctgtatagtaagctgaccgtggataaatcacggtggcagcagggaaatgtgttctcttgcagtgtcatgcacgaggccctgcataaccattacacacagaagtcattaagcttatccggagagtgtggcggcggaggaagcggaggaggcgggtctcaggtgcagctggtggagtctggaggaggagtggtgcagccaggagaatccctgaggatttcttgtgccgtgtcaggcttcagcctgactaattacggggtgcactgggtgcgccaggctccaggcaaagggctggagtggctgggcgtgatctggtccggagggaatacagactacaacacccctttcacaagtaggctgaccatttcaaaggataactcaaaaagcacagtgtatttccagatgaacagcctgcgggccgaggacacagccgtgtactattgcgccagagctctgacttactatgattacgaattcgcctattggggacagggcactctggtgaccgtgagcagcgccagcaccggaggaggaggaagcggcggaggaggctccggaggaggcgggtctggaggcgggggaagtgacatcgtgctgactcagtcaccatctagtctgagcgtgacccccggcgagaaagtgacttttacctgccgggcctcccagtctatcggaaccaatattcattggtatcagcagaaacccggccagtcccctaagctgctgatcaaatatgctagtgaatcaattagcggcgtgcccagccggttcagcgggtctggaagtggcaccgactttacactgactatcaacagtgtggaggccgaagatgccgctacatactattgtcagcagaacaataactggcctaccacatttgggcagggaacaaagctggagatcaagtgataa

SEQ ID NO: 384 - protein, 974 aa, Artificial Sequence
  Description of Artificial Sequence: Synthetic polypeptide
EVQLVESGGGLVQPGGSLRLSCAASGYTFTSYWLHWVRQAPGKGLEWVGMIDPSNSDTRFNPNFKDRFTISADTSKNTAYLQMNSLRAEDTAVYYCATYRSYVTPLDYWGQGTLVTVSSASTKGPSVFPLAPSSKSTSGGTAALGCLVKDYFPEPVTVSWNSGALTSGVHTFPAVLQSSGLYSLSSVVTVPSSSLGTQTYICNVNHKPSNTKVDKKVEPKSCDKTHTCPSCPAPEFLGGPSVFLFPPKPKDTLMISRTPEVTCVVVDVSQEDPEVQFNWYVDGVEVHNAKTKPREEQFNSKYRVVSVLTVLHQDWLNGKEYKCKVSNKGLPSSIEKTISKAKGQPREPQVYTLPPSREEMTKNQVSLSCAVKGFYPSDIAVEWESNGQPENNYKTTPPVLDSDGSFFLVSKLTVDKSRWQQGNVFSCSVMHEALHNHYTQKSLSLSKSCDKTGGGGSGGGGSGGGGSGGGGSGGGGSGGGGSGGGGSGGGGSCPSCPAPEFLGGPSVFLFPPKPKDTLMISRTPEVTCVVVDVSQEDPEVQFNWYVDGVEVHNAKTKPREEQFNSDYRVVSVLTVLHQDWLNGKEYKCKVSNKGLPSSIEKTISKAKGQPREPQVYTLPPSREEMTKNQVSLWCLVKGFYPSDIAVEWESNGQPENNYKTTPPVLDSDGSFFLYSKLTVDKSRWQQGNVFSCSVMHEALHNHYTQKSLSLSGECGGGGSGGGGSQVQLQESGPGLVKPSETLSLTCTVSGGSVSSGDYYWTWIRQSPGKGLEWIGHIYYSGNTNYNPSLKSRLTISIDTSKTQFSLKLSSVTAADTAIYYCVRDRVTGAFDIWGQGTMVTSSASTGGGGSGGGGSGGGGSGGGGSDIQMTQSPSSLSASVGDRVTITCQASQDISNYLNWYQQKPGKAPKLLIYDASNLETGVPSRFSGSGSGTDFTFTISSLQPEDEATYFCQHFDHLPLAFGGGTKVEIKRT

SEQ ID NO: 385 - DNA, 2928 bp, Artificial Sequence
  Description of Artificial Sequence: Synthetic polynucleotide
gaggtgcagttggtagaatcaggagggggtctggtccaacccggaggaagcctcagactcagctgtgcggcttcgggttacacctttacctcctattggttgcactgggtgagacaggcacctggcaaagggctcgaatgggtcggaatgatcgacccctccaactcagatacgcggtttaacccgaatttcaaggatcgattcacgatctcagcagacacatcgaaaaacacagcgtacctccagatgaattcgttgagggccgaggacacggcggtgtattactgcgccacgtatcgcagctatgtaactccattggattactgggggcagggtactcttgtgacagtctcctcggctagcactaagggaccttccgtgttcccactggccccctcaagcaaatctaccagtgggggaacagcagccctgggctgtctggtgaaggattactttccagagcccgtgaccgtcagttggaactcaggggctctgactagcggagtgcacaccttccccgcagtcctgcagtcctctgggctgtactccctgagttcagtggtcactgtgcccagctcctctctgggaacacagacttatatctgcaacgtgaatcacaagccttccaataccaaagtcgacaagaaagtcgagcctaagtcatgtgataaaacccatacatgcccaagctgtcctgcaccagaatttctgggaggaccaagcgtgttcctgtttccacctaagcctaaagacaccctgatgattagtcgcactccagaggtgacctgtgtggtcgtggacgtcagccaggaggatcccgaagtgcagtttaactggtacgtcgatggcgtggaagtccacaatgctaagacaaaaccaagagaggaacagttcaacagcaagtacagggtcgtgtccgtgctgactgtcctgcatcaggactggctgaacggaaaagagtataagtgcaaagtgagcaataagggcctgcccagttcaatcgagaaaacaatttccaaggcaaaaggccagcctcgggaaccacaggtgtataccctgccacccagcagagaggaaatgacaaagaaccaggtgtcactgagctgtgccgtcaaaggcttttaccctagcgatatcgctgtggagtgggaatccaatgggcagccagaaaacaattataagaccacacctccagtgctggacagcgatggatccttctttctggtgtccaagctgaccgtggacaaatctcggtggcagcagggcaacgtgttctcctgctctgtcatgcatgaggccctgcacaatcattacacccagaaaagtctgtcactgagcaagtcctgtgataaaacaggaggcgggggatctggcgggggaggcagtgggggaggcgggtccggaggaggaggaagcggaggaggaggatccggaggaggcgggtctggaggcgggggaagtggaggaggaggatcttgcccaagttgtccagcacctgagttcctgggaggaccatccgtgttcctgtttccccctaagcccaaagacaccctgatgatcagccggacacctgaagtgacttgcgtcgtggtggacgtgtcccaggaggatccagaggtccagtttaactggtatgtcgatggcgtggaggtccacaatgctaagaccaaacctcgcgaggaacagttcaactctgactaccgagtggtcagtgtgctgacagtcctgcatcaggattggctgaacgggaaggaatacaaatgtaaagtgagcaataagggactgccaagctccatcgagaagaccatcagcaaagccaaaggccagcccagggaacctcaggtgtacactctgccaccctcccgcgaggaaatgaccaagaaccaggtgtctctgtggtgtctggtcaaaggattttatccctctgacatcgccgtggagtgggaaagtaatggccagcctgaaaacaattacaagactacccctccagtgctggactcagatgggagcttctttctgtatagtaagctgaccgtggataaatcacggtggcagcagggaaatgtgttctcttgcagtgtcatgcacgaggccctgcataaccattacacacagaagtcattaagcttatccggagagtgtggcggcggaggaagcggaggaggcgggtctcaagtccagttgcaagaaagcgggccaggactcgtgaaaccctcggaaaccctgtcactgacgtgcacggtgagcggagggtccgtgtcgagcggagattactattggacttggattagacagtcgcccggaaaaggtctggagtggatcggacacatctactactcggggaatacgaattacaacccgtcgttgaaatcacggctcacgattagcatcgatacctccaagacgcagttctcgctcaaacttagctccgtaactgcggccgacaccgcaatctactattgtgtacgcgaccgcgtcacaggggcttttgacatttggggtcagggcactatggtgacctcgtcagcgtcgacaggtggtgggggatcaggaggaggtggctccgggggaggcggaagcggcggtgggggctccgacatccagatgacgcagtcgccctcatcattgtcagcatcagtcggggacagggtcactattacttgtcaggccagccaagatatctcgaactatctgaactggtatcagcagaagcctggaaaagcgcctaagctccttatctatgatgcgtccaatcttgagacaggggtgccgtcgcggttttccggttcagggtcgggaacggacttcacgtttacaatctccagcctgcagccggaggacgaagccacctacttctgccaacacttcgaccatttgcctcttgcgttcggaggtgggacaaaggtggagatcaagcgaacttgataa

SEQ ID NO: 386 - protein, 981 aa, Artificial Sequence
  Description of Artificial Sequence: Synthetic polypeptide
EVQLVESGGGLVQPGGSLRLSCAASGYTFTSYWLHWVRQAPGKGLEWVGMIDPSNSDTRFNPNFKDRFTISADTSKNTAYLQMNSLRAEDTAVYYCATYRSYVTPLDYWGQGTLVTVSSASTKGPSVFPLAPSSKSTSGGTAALGCLVKDYFPEPVTVSWNSGALTSGVHTFPAVLQSSGLYSLSSVVTVPSSSLGTQTYICNVNHKPSNTKVDKKVEPKSCDKTHTCPSCPAPEFLGGPSVFLFPPKPKDTLMISRTPEVTCVVVDVSQEDPEVQFNWYVDGVEVHNAKTKPREEQFNSKYRVVSVLTVLHQDWLNGKEYKCKVSNKGLPSSIEKTISKAKGQPREPQVYTLPPSREEMTKNQVSLSCAVKGFYPSDIAVEWESNGQPENNYKTTPPVLDSDGSFFLVSKLTVDKSRWQQGNVFSCSVMHEALHNHYTQKSLSLSKSCDKTGGGGSGGGGSGGGGSGGGGSGGGGSGGGGSGGGGSGGGGSCPSCPAPEFLGGPSVFLFPPKPKDTLMISRTPEVTCVVVDVSQEDPEVQFNWYVDGVEVHNAKTKPREEQFNSDYRVVSVLTVLHQDWLNGKEYKCKVSNKGLPSSIEKTISKAKGQPREPQVYTLPPSREEMTKNQVSLWCLVKGFYPSDIAVEWESNGQPENNYKTTPPVLDSDGSFFLYSKLTVDKSRWQQGNVFSCSVMHEALHNHYTQKSLSLSGECGGGGSGGGGSEVQLVQSGAEVKKPGSSVKVSCKASGGTFSSYAIGWVRQAPGQGLEWMGGIIPIFGIANYAQKFQGRVTITADESTSSAYMELSSLRSEDTAVYYCAREEGPYCSSTSCYAAFDIWGQGTLVTVSSASTGGGGSGGGGSGGGGSGGGGSQSVLTQDPAVSVALGQTVKITCQGDSLRSYFASWYQQKPGQAPTLVMYARNDRPAGVPDRFSGSKSGTSASLAISGLQPEDEADYYCAAWDDSLNGYLFGAGTKLTVL

SEQ ID NO: 387 - DNA, 3030 bp, Artificial Sequence
  Description of Artificial Sequence: Synthetic polynucleotide
ggtaccatgggcttcggactgtcgtggctttttctggtggcgattcttaagggggtccagtgcgaggtgcagttggtagaatcaggagggggtctggtccaacccggaggaagcctcagactcagctgtgcggcttcgggttacacctttacctcctattggttgcactgggtgagacaggcacctggcaaagggctcgaatgggtcggaatgatcgacccctccaactcagatacgcggtttaacccgaatttcaaggatcgattcacgatctcagcagacacatcgaaaaacacagcgtacctccagatgaattcgttgagggccgaggacacggcggtgtattactgcgccacgtatcgcagctatgtaactccattggattactgggggcagggtactcttgtgacagtctcctcggctagcactaagggaccttccgtgttcccactggccccctcaagcaaatctaccagtgggggaacagcagccctgggctgtctggtgaaggattactttccagagcccgtgaccgtcagttggaactcaggggctctgactagcggagtgcacaccttccccgcagtcctgcagtcctctgggctgtactccctgagttcagtggtcactgtgcccagctcctctctgggaacacagacttatatctgcaacgtgaatcacaagccttccaataccaaagtcgacaagaaagtcgagcctaagtcatgtgataaaacccatacatgcccaagctgtcctgcaccagaatttctgggaggaccaagcgtgttcctgtttccacctaagcctaaagacaccctgatgattagtcgcactccagaggtgacctgtgtggtcgtggacgtcagccaggaggatcccgaagtgcagtttaactggtacgtcgatggcgtggaagtccacaatgctaagacaaaaccaagagaggaacagttcaacagcaagtacagggtcgtgtccgtgctgactgtcctgcatcaggactggctgaacggaaaagagtataagtgcaaagtgagcaataagggcctgcccagttcaatcgagaaaacaatttccaaggcaaaaggccagcctcgggaaccacaggtgtataccctgccacccagcagagaggaaatgacaaagaaccaggtgtcactgagctgtgccgtcaaaggcttttaccctagcgatatcgctgtggagtgggaatccaatgggcagccagaaaacaattataagaccacacctccagtgctggacagcgatggatccttctttctggtgtccaagctgaccgtggacaaatctcggtggcagcagggcaacgtgttctcctgctctgtcatgcatgaggccctgcacaatcattacacccagaaaagtctgtcactgagcaagtcctgtgataaaacaggaggcgggggatctggcgggggaggcagtgggggaggcgggtccggaggaggaggaagcggaggaggaggatccggaggaggcgggtctggaggcgggggaagtggaggaggaggatcttgcccaagttgtccagcacctgagttcctgggaggaccatccgtgttcctgtttccccctaagcccaaagacaccctgatgatcagccggacacctgaagtgacttgcgtcgtggtggacgtgtcccaggaggatccagaggtccagtttaactggtatgtcgatggcgtggaggtccacaatgctaagaccaaacctcgcgaggaacagttcaactctgactaccgagtggtcagtgtgctgacagtcctgcatcaggattggctgaacgggaaggaatacaaatgtaaagtgagcaataagggactgccaagctccatcgagaagaccatcagcaaagccaaaggccagcccagggaacctcaggtgtacactctgccaccctcccgcgaggaaatgaccaagaaccaggtgtctctgtggtgtctggtcaaaggattttatccctctgacatcgccgtggagtgggaaagtaatggccagcctgaaaacaattacaagactacccctccagtgctggactcagatgggagcttctttctgtatagtaagctgaccgtggataaatcacggtggcagcagggaaatgtgttctcttgcagtgtcatgcacgaggccctgcataaccattacacacagaagtcattaagcttatccggagagtgtggcggcggaggaagcggaggaggcgggtctgaggtacagctcgtccagagcggcgcagaggtcaagaaaccgggatcaagcgtcaaagtgtcatgtaaagcatcgggtgggaccttttcatcctatgcgattggttgggtccgacaagcgcctggacaggggcttgaatggatgggtggtatcatcccgattttcggaatcgccaactacgcacaaaagtttcaggggagagtgacaattacagccgatgagtcaacgtcctcagcctatatggaactctcatccctgcgcagcgaggacactgcggtctattactgtgcgcgggaagaggggccctactgctcgtcgacctcgtgctacgcggcgtttgatatctggggccagggcaccctcgtgacggtatcgtccgcgtcaacagggggtgggggttcgggcggaggaggatcgggaggaggtggatcgggtggtgggggatcacagtcagtcctgacgcaagacccagcggtatcggtggcccttggacagacagtaaagatcacgtgtcaaggggattcgttgaggtcctacttcgccagctggtatcagcagaagcccggacaggcgcccactcttgtgatgtacgcacgcaacgaccggcctgctggagtgcccgacagattctcggggtcgaaaagcggaacttcagcgtcgttggcaatttccggccttcagccggaggacgaggcggattactactgcgctgcctgggatgactcattgaatgggtatctcttcggtgcggggacgaagttgacggtgctgtgataatgataatctagactcgag

SEQ ID NO: 388 - protein, 492 aa, Artificial Sequence
  Description of Artificial Sequence: Synthetic polypeptide
DKTHTCPSCPAPEFLGGPSVFLFPPKPKDTLMISRTPEVTCVVVDVSQEDPEVQFNWYVDGVEVHNAKTKPREEQFDSSYRVVSVLTVLHQDWLNGKEYKCKVSNKGLPSSIEKTISKAKGQPREPQVYTLPPSREEMTKNQVSLSCAVKGFYPSDIAVEWESNGQPENNYKTTPPVLDSDGSFFLVSKLTVDKSRWQQGNVFSCSVMHEALHNHYTQKSLSLSKSCDKTGGGGSGGGGSGGGGSGGGGSGGGGSGGGGSGGGGSGGGGSCPSCPAPEFLGGPSVFLFPPKPKDTLMISRTPEVTCVVVDVSQEDPEVQFNWYVDGVEVHNAKTKPREEQFDSSYRVVSVLTVLHQDWLNGKEYKCKVSNKGLPSSIEKTISKAKGQPREPQVYTLPPSREEMTKNQVSLWCLVKGFYPSDIAVEWESNGQPENNYKTTPPVLDSDGSFFLYSKLTVDKSRWQQGNVFSCSVMHEALHNHYTQKSLSLSGEC

SEQ ID NO: 389 - DNA, 1482 bp, Artificial Sequence
  Description of Artificial Sequence: Synthetic polynucleotide
gataaaacgcacacgtgcccctcgtgtccggcaccggagtttcttggaggtccctcggtgttcctgttccctcccaagccgaaggacacgttgatgatttcgaggacgccggaggtgacgtgtgtggtcgtagacgtgagccaggaggacccggaagtgcagtttaactggtacgtcgatggagtagaagtacataatgccaagacgaagcccagggaggaacaattcgattcgagctatcgcgtcgtatccgtgctgactgtgctccaccaggactggcttaacggaaaagaatacaagtgcaaggtatcaaataagggactcccctcgtcgatcgagaaaacaatcagcaaagcgaaaggacagccgagggaaccgcaagtgtacacattgccgccgtcgcgagaagaaatgaccaagaaccaggtatcactctcgtgcgccgtgaagggcttttacccatcggacattgctgtggagtgggagagcaacggtcaacccgagaataactacaaaactacaccgcccgtgctggattccgacggctcattctttctcgtgtcaaaactgactgtggataagtcgcgctggcaacaggggaatgtgttctcgtgcagcgtcatgcatgaagctcttcataatcactacacccaaaaatccctgtcactctcgaaaagctgtgataagaccgggggtgggggctccggaggaggcggttcgggtggcggtgggtcgggtggaggcggatcgggcggtgggggaagcggtggtggtggaagcggagggggtggatcaggtggagggggcagctgtccatcctgccctgcaccagagtttttgggaggaccgtccgtatttctgtttccgcccaagcccaaagatactttgatgatcagcaggacgcctgaggtaacatgtgtagtggtcgatgtctcgcaagaggaccctgaggtccagttcaattggtacgtggacggggtggaagtccacaacgcgaaaacgaaaccacgcgaagaacagttcgacagcagttacagagtcgtgtcagtcttgacagtccttcaccaggattggttgaatggaaaggagtacaagtgtaaggtgtcaaacaaaggactgcccagctcgatcgaaaagacaatttcgaaggcaaaaggtcaaccgcgggagccacaagtgtatacgctgccgccctcgcgggaggagatgacaaagaatcaggtgtcgctgtggtgtctggtaaaaggattctatccatccgatatcgcggtagagtgggaatcaaacggccagccggagaacaattacaagaccacgccccctgtattggattcggacggatcgttcttcttgtattcgaaactcacggtggacaagtcgcggtggcagcagggtaatgtgttttcatgctcagtcatgcacgaggcgctccataaccattatactcagaagtcgctgtccttgtccggggagtgctgataa

SEQ ID NO: 390 - protein, 492 aa, Artificial Sequence
  Description of Artificial Sequence: Synthetic polypeptide
DKTHTCPSCPAPEFLGGPSVFLFPPKPKDTLMISRTPEVTCVVVDVSQEDPEVQFNWYVDGVEVHNAKTKPREEQFNSKYRVVSVLTVLHQDWLNGKEYKCKVSNKGLPSSIEKTISKAKGQPREPQVYTLPPSREEMTKNQVSLSCAVKGFYPSDIAVEWESNGQPENNYKTTPPVLDSDGSFFLVSKLTVDKSRWQQGNVFSCSVMHEALHNHYTQKSLSLSKSCDKTGGGGSGGGGSGGGGSGGGGSGGGGSGGGGSGGGGSGGGGSCPSCPAPEFLGGPSVFLFPPKPKDTLMISRTPEVTCVVVDVSQEDPEVQFNWYVDGVEVHNAKTKPREEQFDSSYRVVSVLTVLHQDWLNGKEYKCKVSNKGLPSSIEKTISKAKGQPREPQVYTLPPSREEMTKNQVSLWCLVKGFYPSDIAVEWESNGQPENNYKTTPPVLDSDGSFFLYSKLTVDKSRWQQGNVFSCSVMHEALHNHYTQKSLSLSGEC

SEQ ID NO: 391 - DNA, 1482 bp, Artificial Sequence
  Description of Artificial Sequence: Synthetic polynucleotide
gataaaacgcacacgtgcccctcgtgtccggcaccggagtttcttggaggtccctcggtgttcctgttccctcccaagccgaaggacacgttgatgatttcgaggacgccggaggtgacgtgtgtggtcgtagacgtgagccaggaggacccggaagtgcagtttaactggtacgtcgatggagtagaagtacataatgccaagacgaagcccagggaggaacaattcaattcgaagtatcgcgtcgtatccgtgctgactgtgctccaccaggactggcttaacggaaaagaatacaagtgcaaggtatcaaataagggactcccctcgtcgatcgagaaaacaatcagcaaagcgaaaggacagccgagggaaccgcaagtgtacacattgccgccgtcgcgagaagaaatgaccaagaaccaggtatcactctcgtgcgccgtgaagggcttttacccatcggacattgctgtggagtgggagagcaacggtcaacccgagaataactacaaaactacaccgcccgtgctggattccgacggctcattctttctcgtgtcaaaactgactgtggataagtcgcgctggcaacaggggaatgtgttctcgtgcagcgtcatgcatgaagctcttcataatcactacacccaaaaatccctgtcactctcgaaaagctgtgataagaccgggggtgggggctccggaggaggcggttcgggtggcggtgggtcgggtggaggcggatcgggcggtgggggaagcggtggtggtggaagcggagggggtggatcaggtggagggggcagctgtccatcctgccctgcaccagagtttttgggaggaccgtccgtatttctgtttccgcccaagcccaaagatactttgatgatcagcaggacgcctgaggtaacatgtgtagtggtcgatgtctcgcaagaggaccctgaggtccagttcaattggtacgtggacggggtggaagtccacaacgcgaaaacgaaaccacgcgaagaacagttcgacagcagttacagagtcgtgtcagtcttgacagtccttcaccaggattggttgaatggaaaggagtacaagtgtaaggtgtcaaacaaaggactgcccagctcgatcgaaaagacaatttcgaaggcaaaaggtcaaccgcgggagccacaagtgtatacgctgccgccctcgcgggaggagatgacaaagaatcaggtgtcgctgtggtgtctggtaaaaggattctatccatccgatatcgcggtagagtgggaatcaaacggccagccggagaacaattacaagaccacgccccctgtattggattcggacggatcgttcttcttgtattcgaaactcacggtggacaagtcgcggtggcagcagggtaatgtgttttcatgctcagtcatgcacgaggcgctccataaccattatactcagaagtcgctgtccttgtccggggagtgctgataa

SEQ ID NO: 392 - protein, 492 aa, Artificial Sequence
  Description of Artificial Sequence: Synthetic polypeptide
DKTHTCPSCPAPEFLGGPSVFLFPPKPKDTLMISRTPEVTCVVVDVSQEDPEVQFNWYVDGVEVHNAKTKPREEQFDSSYRVVSVLTVLHQDWLNGKEYKCKVSNKGLPSSIEKTISKAKGQPREPQVYTLPPSREEMTKNQVSLSCAVKGFYPSDIAVEWESNGQPENNYKTTPPVLDSDGSFFLVSKLTVDKSRWQQGNVFSCSVMHEALHNHYTQKSLSLSKSCDKTGGGGSGGGGSGGGGSGGGGSGGGGSGGGGSGGGGSGGGGSCPSCPAPEFLGGPSVFLFPPKPKDTLMISRTPEVTCVVVDVSQEDPEVQFNWYVDGVEVHNAKTKPREEQFNSKYRVVSVLTVLHQDWLNGKEYKCKVSNKGLPSSIEKTISKAKGQPREPQVYTLPPSREEMTKNQVSLWCLVKGFYPSDIAVEWESNGQPENNYKTTPPVLDSDGSFFLYSKLTVDKSRWQQGNVFSCSVMHEALHNHYTQKSLSLSGEC

SEQ ID NO: 393 - DNA, 1482 bp, Artificial Sequence
  Description of Artificial Sequence: Synthetic polynucleotide
gataaaacgcacacgtgcccctcgtgtccggcaccggagtttcttggaggtccctcggtgttcctgttccctcccaagccgaaggacacgttgatgatttcgaggacgccggaggtgacgtgtgtggtcgtagacgtgagccaggaggacccggaagtgcagtttaactggtacgtcgatggagtagaagtacataatgccaagacgaagcccagggaggaacaattcgattcgagttatcgcgtcgtatccgtgctgactgtgctccaccaggactggcttaacggaaaagaatacaagtgcaaggtatcaaataagggactcccctcgtcgatcgagaaaacaatcagcaaagcgaaaggacagccgagggaaccgcaagtgtacacattgccgccgtcgcgagaagaaatgaccaagaaccaggtatcactctcgtgcgccgtgaagggcttttacccatcggacattgctgtggagtgggagagcaacggtcaacccgagaataactacaaaactacaccgcccgtgctggattccgacggctcattctttctcgtgtcaaaactgactgtggataagtcgcgctggcaacaggggaatgtgttctcgtgcagcgtcatgcatgaagctcttcataatcactacacccaaaaatccctgtcactctcgaaaagctgtgataagaccgggggtgggggctccggaggaggcggttcgggtggcggtgggtcgggtggaggcggatcgggcggtgggggaagcggtggtggtggaagcggagggggtggatcaggtggagggggcagctgtccatcctgccctgcaccagagtttttgggaggaccgtccgtatttctgtttccgcccaagcccaaagatactttgatgatcagcaggacgcctgaggtaacatgtgtagtggtcgatgtctcgcaagaggaccctgaggtccagttcaattggtacgtggacggggtggaagtccacaacgcgaaaacgaaaccacgcgaagaacagttcaacagcaaatacagagtcgtgtcagtcttgacagtccttcaccaggattggttgaatggaaaggagtacaagtgtaaggtgtcaaacaaaggactgcccagctcgatcgaaaagacaatttcgaaggcaaaaggtcaaccgcgggagccacaagtgtatacgctgccgccctcgcgggaggagatgacaaagaatcaggtgtcgctgtggtgtctggtaaaaggattctatccatccgatatcgcggtagagtgggaatcaaacggccagccggagaacaattacaagaccacgccccctgtattggattcggacggatcgttcttcttgtattcgaaactcacggtggacaagtcgcggtggcagcagggtaatgtgttttcatgctcagtcatgcacgaggcgctccataaccattatactcagaagtcgctgtccttgtccggggagtgctgataa

SEQ ID NO: 394 - protein, 492 aa, Artificial Sequence
  Description of Artificial Sequence: Synthetic polypeptide
DKTHTCPSCPAPEFLGGPSVFLFPPKPKDTLMISRTPEVTCVVVDVSQEDPEVQFNWYVDGVEVHNAKTKPREEQFNSKYRVVSVLTVLHQDWLNGKEYKCKVSNKGLPSSIEKTISKAKGQPREPQVYTLPPSREEMTKNQVSLSCAVKGFYPSDIAVEWESNGQPENNYKTTPPVLDSDGSFFLVSKLTVDKSRWQQGNVFSCSVMHEALHNHYTQKSLSLSKSCDKTGGGGSGGGGSGGGGSGGGGSGGGGSGGGGSGGGGSGGGGSCPSCPAPEFLGGPSVFLFPPKPKDTLMISRTPEVTCVVVDVSQEDPEVQFNWYVDGVEVHNAKTKPREEQFNSDYRVVSVLTVLHQDWLNGKEYKCKVSNKGLPSSIEKTISKAKGQPREPQVYTLPPSREEMTKNQVSLWCLVKGFYPSDIAVEWESNGQPENNYKTTPPVLDSDGSFFLYSKLTVDKSRWQQGNVFSCSVMHEALHNHYTQKSLSLSGEC

SEQ ID NO: 395 - DNA, 1482 bp, Artificial Sequence
  Description of Artificial Sequence: Synthetic polynucleotide
gataaaacgcacacgtgcccctcgtgtccggcaccggagtttcttggaggtccctcggtgttcctgttccctcccaagccgaaggacacgttgatgatttcgaggacgccggaggtgacgtgtgtggtcgtagacgtgagccaggaggacccggaagtgcagtttaactggtacgtcgatggagtagaagtacataatgccaagacgaagcccagggaggaacaattcaattcgaagtatcgcgtcgtatccgtgctgactgtgctccaccaggactggcttaacggaaaagaatacaagtgcaaggtatcaaataagggactcccctcgtcgatcgagaaaacaatcagcaaagcgaaaggacagccgagggaaccgcaagtgtacacattgccgccgtcgcgagaagaaatgaccaagaaccaggtatcactctcgtgcgccgtgaagggcttttacccatcggacattgctgtggagtgggagagcaacggtcaacccgagaataactacaaaactacaccgcccgtgctggattccgacggctcattctttctcgtgtcaaaactgactgtggataagtcgcgctggcaacaggggaatgtgttctcgtgcagcgtcatgcatgaagctcttcataatcactacacccaaaaatccctgtcactctcgaaaagctgtgataagaccgggggtgggggctccggaggaggcggttcgggtggcggtgggtcgggtggaggcggatcgggcggtgggggaagcggtggtggtggaagcggagggggtggatcaggtggagggggcagctgtccatcctgccctgcaccagagtttttgggaggaccgtccgtatttctgtttccgcccaagcccaaagatactttgatgatcagcaggacgcctgaggtaacatgtgtagtggtcgatgtctcgcaagaggaccctgaggtccagttcaattggtacgtggacggggtggaagtccacaacgcgaaaacgaaaccacgcgaagaacagttcaacagcgattacagagtcgtgtcagtcttgacagtccttcaccaggattggttgaatggaaaggagtacaagtgtaaggtgtcaaacaaaggactgcccagctcgatcgaaaagacaatttcgaaggcaaaaggtcaaccgcgggagccacaagtgtatacgctgccgccctcgcgggaggagatgacaaagaatcaggtgtcgctgtggtgtctggtaaaaggattctatccatccgatatcgcggtagagtgggaatcaaacggccagccggagaacaattacaagaccacgccccctgtattggattcggacggatcgttcttcttgtattcgaaactcacggtggacaagtcgcggtggcagcagggtaatgtgttttcatgctcagtcatgcacgaggcgctccataaccattatactcagaagtcgctgtccttgtccggggagtgctgataa

SEQ ID NO: 396 - protein, 492 aa, Artificial Sequence
  Description of Artificial Sequence: Synthetic polypeptide
DKTHTCPSCPAPEFLGGPSVFLFPPKPKDTLMISRTPEVTCVVVDVSQEDPEVQFNWYVDGVEVHNAKTKPREEQFNSDYRVVSVLTVLHQDWLNGKEYKCKVSNKGLPSSIEKTISKAKGQPREPQVYTLPPSREEMTKNQVSLSCAVKGFYPSDIAVEWESNGQPENNYKTTPPVLDSDGSFFLVSKLTVDKSRWQQGNVFSCSVMHEALHNHYTQKSLSLSKSCDKTGGGGSGGGGSGGGGSGGGGSGGGGSGGGGSGGGGSGGGGSCPSCPAPEFLGGPSVFLFPPKPKDTLMISRTPEVTCVVVDVSQEDPEVQFNWYVDGVEVHNAKTKPREEQFNSKYRVVSVLTVLHQDWLNGKEYKCKVSNKGLPSSIEKTISKAKGQPREPQVYTLPPSREEMTKNQVSLWCLVKGFYPSDIAVEWESNGQPENNYKTTPPVLDSDGSFFLYSKLTVDKSRWQQGNVFSCSVMHEALHNHYTQKSLSLSGEC

SEQ ID NO: 397 - DNA, 1482 bp, Artificial Sequence
  Description of Artificial Sequence: Synthetic polynucleotide
gataaaacgcacacgtgcccctcgtgtccggcaccggagtttcttggaggtccctcggtgttcctgttccctcccaagccgaaggacacgttgatgatttcgaggacgccggaggtgacgtgtgtggtcgtagacgtgagccaggaggacccggaagtgcagtttaactggtacgtcgatggagtagaagtacataatgccaagacgaagcccagggaggaacaattcaattcggactatcgcgtcgtatccgtgctgactgtgctccaccaggactggcttaacggaaaagaatacaagtgcaaggtatcaaataagggactcccctcgtcgatcgagaaaacaatcagcaaagcgaaaggacagccgagggaaccgcaagtgtacacattgccgccgtcgcgagaagaaatgaccaagaaccaggtatcactctcgtgcgccgtgaagggcttttacccatcggacattgctgtggagtgggagagcaacggtcaacccgagaataactacaaaactacaccgcccgtgctggattccgacggctcattctttctcgtgtcaaaactgactgtggataagtcgcgctggcaacaggggaatgtgttctcgtgcagcgtcatgcatgaagctcttcataatcactacacccaaaaatccctgtcactctcgaaaagctgtgataagaccgggggtgggggctccggaggaggcggttcgggtggcggtgggtcgggtggaggcggatcgggcggtgggggaagcggtggtggtggaagcggagggggtggatcaggtggagggggcagctgtccatcctgccctgcaccagagtttttgggaggaccgtccgtatttctgtttccgcccaagcccaaagatactttgatgatcagcaggacgcctgaggtaacatgtgtagtggtcgatgtctcgcaagaggaccctgaggtccagttcaattggtacgtggacggggtggaagtccacaacgcgaaaacgaaaccacgcgaagaacagttcaacagcaaatacagagtcgtgtcagtcttgacagtccttcaccaggattggttgaatggaaaggagtacaagtgtaaggtgtcaaacaaaggactgcccagctcgatcgaaaagacaatttcgaaggcaaaaggtcaaccgcgggagccacaagtgtatacgctgccgccctcgcgggaggagatgacaaagaatcaggtgtcgctgtggtgtctggtaaaaggattctatccatccgatatcgcggtagagtgggaatcaaacggccagccggagaacaattacaagaccacgccccctgtattggattcggacggatcgttcttcttgtattcgaaactcacggtggacaagtcgcggtggcagcagggtaatgtgttttcatgctcagtcatgcacgaggcgctccataaccattatactcagaagtcgctgtccttgtccggggagtgctgataa

SEQ ID NO: 398 - protein, 492 aa, Artificial Sequence
  Description of Artificial Sequence: Synthetic polypeptide
DKTHTCPSCPAPEFLGGPSVFLFPPKPKDTLMISRTPEVTCVVVDVSQEDPEVQFNWYVDGVEVHNAKTKPREEQFNSDYRVVSVLTVLHQDWLNGKEYKCKVSNKGLPSSIEKTISKAKGQPREPQVYTLPPSREEMTKNQVSLSCAVKGFYPSDIAVEWESNGQPENNYKTTPPVLDSDGSFFLVSKLTVDKSRWQQGNVFSCSVMHEALHNHYTQKSLSLSKSCDKTGGGGSGGGGSGGGGSGGGGSGGGGSGGGGSGGGGSGGGGSCPSCPAPEFLGGPSVFLFPPKPKDTLMISRTPEVTCVVVDVSQEDPEVQFNWYVDGVEVHNAKTKPREEQFNSDYRVVSVLTVLHQDWLNGKEYKCKVSNKGLPSSIEKTISKAKGQPREPQVYTLPPSREEMTKNQVSLWCLVKGFYPSDIAVEWESNGQPENNYKTTPPVLDSDGSFFLYSKLTVDKSRWQQGNVFSCSVMHEALHNHYTQKSLSLSGEC

SEQ ID NO: 399 - DNA, 1482 bp, Artificial Sequence
  Description of Artificial Sequence: Synthetic polynucleotide
gataaaacgcacacgtgcccctcgtgtccggcaccggagtttcttggaggtccctcggtgttcctgttccctcccaagccgaaggacacgttgatgatttcgaggacgccggaggtgacgtgtgtggtcgtagacgtgagccaggaggacccggaagtgcagtttaactggtacgtcgatggagtagaagtacataatgccaagacgaagcccagggaggaacaattcaattcggattatcgcgtcgtatccgtgctgactgtgctccaccaggactggcttaacggaaaagaatacaagtgcaaggtatcaaataagggactcccctcgtcgatcgagaaaacaatcagcaaagcgaaaggacagccgagggaaccgcaagtgtacacattgccgccgtcgcgagaagaaatgaccaagaaccaggtatcactctcgtgcgccgtgaagggcttttacccatcggacattgctgtggagtgggagagcaacggtcaacccgagaataactacaaaactacaccgcccgtgctggattccgacggctcattctttctcgtgtcaaaactgactgtggataagtcgcgctggcaacaggggaatgtgttctcgtgcagcgtcatgcatgaagctcttcataatcactacacccaaaaatccctgtcactctcgaaaagctgtgataagaccgggggtgggggctccggaggaggcggttcgggtggcggtgggtcgggtggaggcggatcgggcggtgggggaagcggtggtggtggaagcggagggggtggatcaggtggagggggcagctgtccatcctgccctgcaccagagtttttgggaggaccgtccgtatttctgtttccgcccaagcccaaagatactttgatgatcagcaggacgcctgaggtaacatgtgtagtggtcgatgtctcgcaagaggaccctgaggtccagttcaattggtacgtggacggggtggaagtccacaacgcgaaaacgaaaccacgcgaagaacagttcaacagcgattacagagtcgtgtcagtcttgacagtccttcaccaggattggttgaatggaaaggagtacaagtgtaaggtgtcaaacaaaggactgcccagctcgatcgaaaagacaatttcgaaggcaaaaggtcaaccgcgggagccacaagtgtatacgctgccgccctcgcgggaggagatgacaaagaatcaggtgtcgctgtggtgtctggtaaaaggattctatccatccgatatcgcggtagagtgggaatcaaacggccagccggagaacaattacaagaccacgccccctgtattggattcggacggatcgttcttcttgtattcgaaactcacggtggacaagtcgcggtggcagcagggtaatgtgttttcatgctcagtcatgcacgaggcgctccataaccattatactcagaagtcgctgtccttgtccggggagtgctgataa

SEQ ID NO: 400 - protein, 214 aa, Artificial Sequence
  Description of Artificial Sequence: Synthetic polypeptide
DIQMTQSPSSVSASVGDRVTITCRASQGISSWLAWYQQKPGKAPKLLIYAASSLQSGVPSRFSGSGSGTDFTLTISSLQPEDFATYYCLQANSFPPTFGGGTKVEIKRTVAAPSVFIFPPSDEQLKSGTASVVCLLNNFYPREAKVQWKVDNALQSGNSQESVTEQDSKDSTYSLSSTLTLSKADYEKHKVYACEVTHQGLSSPVTKSFNRGEC

SEQ ID NO: 401 - protein, 4 aa, Artificial Sequence
  Description of Artificial Sequence: Synthetic peptide
  MOD_RES (1)..(4): Any amino acid
XXXX

SEQ ID NO: 402 - DNA, 648 bp, Artificial Sequence
  Description of Artificial Sequence: Synthetic polynucleotide
gacattcagatgacccagtctccttcaagcgtcagcgcttccgtgggcgaccgggtcaccatcacatgcagagcctcccaggggattagctcctggctggcttggtatcagcagaagcctgggaaagcaccaaagctgctgatctatgccgcttctagtctgcagtccggagtgccctctcgattctctggcagtgggtcaggaaccgactttactctgaccatttcaagcctgcagcctgaggatttcgctacatactattgcctgcaggcaaactctttcccccctacctttggcgggggaacaaaagtggagatcaagcgtacggtggcagccccatccgtcttcatttttccaccctctgacgaacagctgaaaagtggcacagccagcgtggtctgtctgctgaacaatttttacccccgcgaagccaaagtgcagtggaaggtcgataacgctctgcagagcgggaattcccaggagtctgtgactgaacaggacagtaaagattcaacctatagcctgtcctctacactgactctgagcaaggcagattacgagaagcacaaagtgtatgcctgcgaagtcacacatcagggactgagttcacctgtgactaagagcttcaatagaggcgagtgttgataa

SEQ ID NO: 403 - protein, 973 aa, Artificial Sequence
  Description of Artificial Sequence: Synthetic polypeptide
QLQLQESGPGLVKPSETLSLTCTVSGGSISSSVYYWSWIRQPPGKGLEWIGVIYPSGNTYYSPSLKSRVTISVDTSKNQFSLKLSSVTAADTAVYYCARTIYDLFDIWGQGTMVTVSSASTKGPSVFPLAPSSKSTSGGTAALGCLVKDYFPEPVTVSWNSGALTSGVHTFPAVLQSSGLYSLSSVVTVPSSSLGTQTYICNVNHKPSNTKVDKKVEPKSCDKTHTCPSCPAPEFLGGPSVFLFPPKPKDTLMISRTPEVTCVVVDVSQEDPEVQFNWYVDGVEVHNAKTKPREEQFNSKYRVVSVLTVLHQDWLNGKEYKCKVSNKGLPSSIEKTISKAKGQPREPQVYTLPPSREEMTKNQVSLSCAVKGFYPSDIAVEWESNGQPENNYKTTPPVLDSDGSFFLVSKLTVDKSRWQQGNVFSCSVMHEALHNHYTQKSLSLSKSCDKTGGGGSGGGGSGGGGSGGGGSGGGGSGGGGSGGGGSGGGGSCPSCPAPEFLGGPSVFLFPPKPKDTLMISRTPEVTCVVVDVSQEDPEVQFNWYVDGVEVHNAKTKPREEQFNSDYRVVSVLTVLHQDWLNGKEYKCKVSNKGLPSSIEKTISKAKGQPREPQVYTLPPSREEMTKNQVSLWCLVKGFYPSDIAVEWESNGQPENNYKTTPPVLDSDGSFFLYSKLTVDKSRWQQGNVFSCSVMHEALHNHYTQKSLSLSGECGGGGSGGGGSDIVMTQSPLSLPVTPGEPASISCRSTKSLLHSNGITYLYWYLQKPGQSPQLLIYQMSNLASGVPDRFSSSGSGTDFTLKISRVEAEDEGVYYCAQNLEIPRTFGGGTKLEIKRTGGGGSGGGGSGGGGSGGGGSQVQLVQSGAEVKKPGESVKISCKASGYTFTNYGMNWVRQAPGQGLKWMGWINTYTGESTYADDFKGRFAFSLDTSASTAYLQLSSLRSEDTAVYFCARFAIKGDYWGQGTLVTVSS

SEQ ID NO: 404 - protein, 974 aa, Artificial Sequence
  Description of Artificial Sequence: Synthetic polypeptide
QLQLQESGPGLVKPSETLSLTCTVSGGSISSSVYYWSWIRQPPGKGLEWIGVIYPSGNTYYSPSLKSRVTISVDTSKNQFSLKLSSVTAADTAVYYCARTIYDLFDIWGQGTMVTVSSASTKGPSVFPLAPSSKSTSGGTAALGCLVKDYFPEPVTVSWNSGALTSGVHTFPAVLQSSGLYSLSSVVTVPSSSLGTQTYICNVNHKPSNTKVDKKVEPKSCDKTHTCPSCPAPEFLGGPSVFLFPPKPKDTLMISRTPEVTCVVVDVSQEDPEVQFNWYVDGVEVHNAKTKPREEQFNSKYRVVSVLTVLHQDWLNGKEYKCKVSNKGLPSSIEKTISKAKGQPREPQVYTLPPSREEMTKNQVSLSCAVKGFYPSDIAVEWESNGQPENNYKTTPPVLDSDGSFFLVSKLTVDKSRWQQGNVFSCSVMHEALHNHYTQKSLSLSKSCDKTGGGGSGGGGSGGGGSGGGGSGGGGSGGGGSGGGGSGGGGSCPSCPAPEFLGGPSVFLFPPKPKDTLMISRTPEVTCVVVDVSQEDPEVQFNWYVDGVEVHNAKTKPREEQFNSDYRVVSVLTVLHQDWLNGKEYKCKVSNKGLPSSIEKTISKAKGQPREPQVYTLPPSREEMTKNQVSLWCLVKGFYPSDIAVEWESNGQPENNYKTTPPVLDSDGSFFLYSKLTVDKSRWQQGNVFSCSVMHEALHNHYTQKSLSLSGECGGGGSGGGGSQVQLVQSGSELKKPGESVKVSCKASGYTFTNYGMHWVRQAPGQGLKWMGWINTYTGESTYADDFKGRFAFSLDTSASTAYLQISSLKAEDTAVYFCARFAIKGDYWGQGTLVTVSSASTGGGGSGGGGSGGGGSGGGGSDIVMTQSPLSLPVTPGEPASISCRSTKSLLHSDGITYLYWYLQKPGQSPQLLIYQLSNLASGVPDRFSSSGSGTDFTLKISRVEAEDEGVYYCAQNLEIPYTFGQGTKVEIK

SEQ ID NO: 405 - protein, 974 aa, Artificial Sequence
  Description of Artificial Sequence: Synthetic polypeptide
QLQLQESGPGLVKPSETLSLTCTVSGGSISSSVYYWSWIRQPPGKGLEWIGVIYPSGNTYYSPSLKSRVTISVDTSKNQFSLKLSSVTAADTAVYYCARTIYDLFDIWGQGTMVTVSSASTKGPSVFPLAPSSKSTSGGTAALGCLVKDYFPEPVTVSWNSGALTSGVHTFPAVLQSSGLYSLSSVVTVPSSSLGTQTYICNVNHKPSNTKVDKKVEPKSCDKTHTCPSCPAPEFLGGPSVFLFPPKPKDTLMISRTPEVTCVVVDVSQEDPEVQFNWYVDGVEVHNAKTKPREEQFNSKYRVVSVLTVLHQDWLNGKEYKCKVSNKGLPSSIEKTISKAKGQPREPQVYTLPPSREEMTKNQVSLSCAVKGFYPSDIAVEWESNGQPENNYKTTPPVLDSDGSFFLVSKLTVDKSRWQQGNVFSCSVMHEALHNHYTQKSLSLSKSCDKTGGGGSGGGGSGGGGSGGGGSGGGGSGGGGSGGGGSGGGGSCPSCPAPEFLGGPSVFLFPPKPKDTLMISRTPEVTCVVVDVSQEDPEVQFNWYVDGVEVHNAKTKPREEQFNSDYRVVSVLTVLHQDWLNGKEYKCKVSNKGLPSSIEKTISKAKGQPREPQVYTLPPSREEMTKNQVSLWCLVKGFYPSDIAVEWESNGQPENNYKTTPPVLDSDGSFFLYSKLTVDKSRWQQGNVFSCSVMHEALHNHYTQKSLSLSGECGGGGSGGGGSQVQLVQSGSELKKPGESVKVSCKASGYTFTNYGMNWVRQAPGQGLKWMGWINTYTGESTYADDFKGRFAFSLDTSASTAYLQISSLKAEDTAVYFCARFAIKGDYWGQGTLVTVSSASTGGGGSGGGGSGGGGSGGGGSDIVMTQSPLSLPVTPGEPASISCRSTKSLLHSDGITYLYWYLQKPGQSPQLLIYQLSNLASGVPDRFSSSGSGTDFTLKISRVEAEDEGVYYCAQNLEIPRTFGQGTKVEIK

SEQ ID NO: 406 - protein, 974 aa, Artificial Sequence
  Description of Artificial Sequence: Synthetic polypeptide
QLQLQESGPGLVKPSETLSLTCTVSGGSISSSVYYWSWIRQPPGKGLEWIGVIYPSGNTYYSPSLKSRVTISVDTSKNQFSLKLSSVTAADTAVYYCARTIYDLFDIWGQGTMVTVSSASTKGPSVFPLAPSSKSTSGGTAALGCLVKDYFPEPVTVSWNSGALTSGVHTFPAVLQSSGLYSLSSVVTVPSSSLGTQTYICNVNHKPSNTKVDKKVEPKSCDKTHTCPSCPAPEFLGGPSVFLFPPKPKDTLMISRTPEVTCVVVDVSQEDPEVQFNWYVDGVEVHNAKTKPREEQFNSKYRVVSVLTVLHQDWLNGKEYKCKVSNKGLPSSIEKTISKAKGQPREPQVYTLPPSREEMTKNQVSLSCAVKGFYPSDIAVEWESNGQPENNYKTTPPVLDSDGSFFLVSKLTVDKSRWQQGNVFSCSVMHEALHNHYTQKSLSLSKSCDKTGGGGSGGGGSGGGGSGGGGSGGGGSGGGGSGGGGSGGGGSCPSCPAPEFLGGPSVFLFPPKPKDTLMISRTPEVTCVVVDVSQEDPEVQFNWYVDGVEVHNAKTKPREEQFNSDYRVVSVLTVLHQDWLNGKEYKCKVSNKGLPSSIEKTISKAKGQPREPQVYTLPPSREEMTKNQVSLWCLVKGFYPSDIAVEWESNGQPENNYKTTPPVLDSDGSFFLYSKLTVDKSRWQQGNVFSCSVMHEALHNHYTQKSLSLSGECGGGGSGGGGSDIVMTQSPLSLPVTPGEPASISCRSTKSLLHSDGITYLYWYLQKPGQSPQLLIYQLSNLASGVPDRFSSSGSGTDFTLKISRVEAEDEGVYYCAQNLEIPRTFGQGTKVEIKRTGGGGSGGGGSGGGGSGGGGSGQVQLVQSGSELKKPGESVKVSCKASGYTFTNYGMNWVRQAPGQGLKWMGWINTYTGESTYADDFKGRFAFSLDTSASTAYLQISSLKAEDTAVYFCARFAIKGDYWGQGTLVTVSS

SEQ ID NO: 407 - protein, 973 aa, Artificial Sequence; identical to SEQ ID NO: 403
  Description of Artificial Sequence: Synthetic polypeptide

SEQ ID NO: 408 - DNA, 2925 bp, Artificial Sequence
  Description of Artificial Sequence: Synthetic polynucleotide
cagctgcagctgcaggagagcggacccggactggtcaagccctccgagacactgtctctgacctgcacagtgtcaggcgggagcatcagctcctctgtctactattggtcttggattcggcagccccctggaaagggcctggaatggatcggcgtgatctacccaagtgggaacacttactattctcccagtctgaaatccagagtgaccatcagtgtcgacacatcaaagaatcagttcagcctgaaactgagttcagtgacagccgctgatactgcagtctactattgtgccaggaccatctatgacctgtttgatatttgggggcagggaactatggtgaccgtcagctccgctagcactaagggaccttccgtgttcccactggccccctcaagcaaatctaccagtgggggaacagcagccctgggctgtctggtgaaggattactttccagagcccgtgaccgtcagttggaactcaggggctctgactagcggagtgcacaccttccccgcagtcctgcagtcctctgggctgtactccctgagttcagtggtcactgtgcccagctcctctctgggaacacagacttatatctgcaacgtgaatcacaagccttccaataccaaagtcgacaagaaagtcgagcctaagtcatgtgataaaacccatacatgcccaagctgtcctgcaccagaatttctgggaggaccaagcgtgttcctgtttccacctaagcctaaagacaccctgatgattagtcgcactccagaggtgacctgtgtggtcgtggacgtcagccaggaggatcccgaagtgcagtttaactggtacgtcgatggcgtggaagtccacaatgctaagacaaaaccaagagaggaacagttcaacagcaagtacagggtcgtgtccgtgctgactgtcctgcatcaggactggctgaacggaaaagagtataagtgcaaagtgagcaataagggcctgcccagttcaatcgagaaaacaatttccaaggcaaaaggccagcctcgggaaccacaggtgtataccctgccacccagcagagaggaaatgacaaagaaccaggtgtcactgagctgtgccgtcaaaggcttttaccctagcgatatcgctgtggagtgggaatccaatgggcagccagaaaacaattataagaccacacctccagtgctggacagcgatggatccttctttctggtgtccaagctgaccgtggacaaatctcggtggcagcagggcaacgtgttctcctgctctgtcatgcatgaggccctgcacaatcattacacccagaaaagtctgtcactgagcaagtcctgtgataaaacaggaggcgggggatctggcgggggaggcagtgggggaggcgggtccggaggaggaggaagcggaggaggaggatccggaggaggcgggtctggaggcgggggaagtggaggaggaggatcttgcccaagttgtccagcacctgagttcctgggaggaccatccgtgttcctgtttccccctaagcccaaagacaccctgatgatcagccggacacctgaagtgacttgcgtcgtggtggacgtgtcccaggaggatccagaggtccagtttaactggtatgtcgatggcgtggaggtccacaatgctaagaccaaacctcgcgaggaacagttcaactctgactaccgagtggtcagtgtgctgacagtcctgcatcaggattggctgaacgggaaggaatacaaatgtaaagtgagcaataagggactgccaagctccatcgagaagaccatcagcaaagccaaaggccagcccagggaacctcaggtgtacactctgccaccctcccgcgaggaaatgaccaagaaccaggtgtctctgtggtgtctggtcaaaggattttatccctctgacatcgccgtggagtgggaaagtaatggccagcctgaaaacaattacaagactacccctccagtgctggactcagatgggagcttctttctgtatagtaagctgaccgtggataaatcacggtggcagcagggaaatgtgttctcttgcagtgtcatgcacgaggccctgcataaccattacacacagaagtcattaagcttatcgggggaatgtggaggcggagggagcggcggaggcggcagcgatatcgtgatgacacagtcacccctgtcgctccctgtgactcccggagagcctgcgtccatctcgtgccggtcaacaaagtccctgctgcacagcaatggaattacgtatttgtactggtatttgcaaaaacccggacagagcccgcaattgttgatctaccagatgtcaaaccttgcgagcggggtcccggatcgctttagctcgtcggggtcaggaactgacttcacactcaaaatctcaagggtcgaggccgaggatgaaggtgtctattactgcgctcagaatctcgaaatcccgcggacctttggtggaggtacgaagctggagatcaagcgaacgggaggcggtgggtccggtggcggtggttccggcggaggtggttcgggaggaggaggtagccaggtgcagcttgtccagtcgggagcagaggtaaagaagccaggagagtcggtgaaaatctcgtgtaaagcctcggggtacacattcacgaactacggcatgaattgggtgagacaagctcccgggcagggcttgaaatggatgggatggattaacacctacacaggggaatccacatatgcggacgacttcaaggggaggttcgcgttttcacttgatacttcagcgagcacggcgtatctccaactctcgtcgcttcgctccgaagataccgcagtatacttttgcgccagattcgcgattaaaggggactattggggacaggggacccttgtcacggtgtcatcatgataa

SEQ ID NO: 409 - protein, 973 aa, Artificial Sequence
  Description of Artificial Sequence: Synthetic polypeptide
QLQLQESGPGLVKPSETLSLTCTVSGGSISSSVYYWSWIRQPPGKGLEWIGVIYPSGNTYYSPSLKSRVTISVDTSKNQFSLKLSSVTAADTAVYYCARTIYDLFDIWGQGTMVTVSSASTKGPSVFPLAPSSKSTSGGTAALGCLVKDYFPEPVTVSWNSGALTSGVHTFPAVLQSSGLYSLSSVVTVPSSSLGTQTYICNVNHKPSNTKVDKKVEPKSCDKTHTCPSCPAPEFLGGPSVFLFPPKPKDTLMISRTPEVTCVVVDVSQEDPEVQFNWYVDGVEVHNAKTKPREEQFNSKYRVVSVLTVLHQDWLNGKEYKCKVSNKGLPSSIEKTISKAKGQPREPQVYTLPPSREEMTKNQVSLSCAVKGFYPSDIAVEWESNGQPENNYKTTPPVLDSDGSFFLVSKLTVDKSRWQQGNVFSCSVMHEALHNHYTQKSLSLSKSCDKTGGGGSGGGGSGGGGSGGGGSGGGGSGGGGSGGGGSGGGGSCPSCPAPEFLGGPSVFLFPPKPKDTLMISRTPEVTCVVVDVSQEDPEVQFNWYVDGVEVHNAKTKPREEQFNSDYRVVSVLTVLHQDWLNGKEYKCKVSNKGLPSSIEKTISKAKGQPREPQVYTLPPSREEMTKNQVSLWCLVKGFYPSDIAVEWESNGQPENNYKTTPPVLDSDGSFFLYSKLTVDKSRWQQGNVFSCSVMHEALHNHYTQKSLSLSGECGGGGSGGGGSDIVMTQSPLSLPVTPGEPASISCRSTKSLLHSDGITYLYWYLQKPGQSPQLLIYQLSNLASGVPDRFSSSGSGTDFTLKISRVEAEDEGVYYCAQNLEIPRTFGGGTKLEIKRTGGGGSGGGGSGGGGSGGGGSQVQLVQSGAEVKKPGESVKISCKASGYTFTNYGMNWVRQAPGQGLKWMGWINTYTGESTYADDFKGRFAFSLDTSASTAYLQLSSLRSEDTAVYFCARFAIKGDYWGQGTLVTVSS

SEQ ID NO: 410 - protein, 973 aa, Artificial Sequence
  Description of Artificial Sequence: Synthetic polypeptide
QLQLQESGPGLVKPSETLSLTCTVSGGSISSSVYYWSWIRQPPGKGLEWIGVIYPSGNTYYSPSLKSRVTISVDTSKNQFSLKLSSVTAADTAVYYCARTIYDLFDIWGQGTMVTVSSASTKGPSVFPLAPSSKSTSGGTAALGCLVKDYFPEPVTVSWNSGALTSGVHTFPAVLQSSGLYSLSSVVTVPSSSLGTQTYICNVNHKPSNTKVDKKVEPKSCDKTHTCPSCPAPEFLGGPSVFLFPPKPKDTLMISRTPEVTCVVVDVSQEDPEVQFNWYVDGVEVHNAKTKPREEQFNSKYRVVSVLTVLHQDWLNGKEYKCKVSNKGLPSSIEKTISKAKGQPREPQVYTLPPSREEMTKNQVSLSCAVKGFYPSDIAVEWESNGQPENNYKTTPPVLDSDGSFFLVSKLTVDKSRWQQGNVFSCSVMHEALHNHYTQKSLSLSKSCDKTGGGGSGGGGSGGGGSGGGGSGGGGSGGGGSGGGGSGGGGSCPSCPAPEFLGGPSVFLFPPKPKDTLMISRTPEVTCVVVDVSQEDPEVQFNWYVDGVEVHNAKTKPREEQFNSDYRVVSVLTVLHQDWLNGKEYKCKVSNKGLPSSIEKTISKAKGQPREPQVYTLPPSREEMTKNQVSLWCLVKGFYPSDIAVEWESNGQPENNYKTTPPVLDSDGSFFLYSKLTVDKSRWQQGNVFSCSVMHEALHNHYTQKSLSLSGECGGGGSGGGGSDIVMTQSPLSLPVTPGEPASISCRSTKSLLHSDGITYLYWYLQKPGQSPQLLIYQLSNLASGVPDRFSSSGSGTDFTLKISRVEAEDEGVYYCAQNLEIPRTFGCGTKLEIKRTGGGGSGGGGSGGGGSGGGGSQVQLVQSGAEVKKPGESVKISCKASGYTFTNYGMNWVRQAPGQCLKWMGWINTYTGESTYADDFKGRFAFSLDTSASTAYLQLSSLRSEDTAVYFCARFAIKGDYWGQGTLVTVSS

SEQ ID NO: 411 - DNA, 2925 bp, Artificial Sequence
  Description of Artificial Sequence: Synthetic polynucleotide
cagctgcagctgcaggagagcggacccggactggtcaagccctccgagacactgtctctgacctgcacagtgtcaggcgggagcatcagctcctctgtctactattggtcttggattcggcagccccctggaaagggcctggaatggatcggcgtgatctacccaagtgggaacacttactattctcccagtctgaaatccagagtgaccatcagtgtcgacacatcaaagaatcagttcagcctgaaactgagttcagtgacagccgctgatactgcagtctactattgtgccaggaccatctatgacctgtttgatatttgggggcagggaactatggtgaccgtcagctccgctagcactaagggaccttccgtgttcccactggccccctcaagcaaatctaccagtgggggaacagcagccctgggctgtctggtgaaggattactttccagagcccgtgaccgtcagttggaactcaggggctctgactagcggagtgcacaccttccccgcagtcctgcagtcctctgggctgtactccctgagttcagtggtcactgtgcccagctcctctctgggaacacagacttatatctgcaacgtgaatcacaagccttccaataccaaagtcgacaagaaagtcgagcctaagtcatgtgataaaacccatacatgcccaagctgtcctgcaccagaatttctgggaggaccaagcgtgttcctgtttccacctaagcctaaagacaccctgatgattagtcgcactccagaggtgacctgtgtggtcgtggacgtcagccaggaggatcccgaagtgcagtttaactggtacgtcgatggcgtggaagtccacaatgctaagacaaaaccaagagaggaacagttcaacagcaagtacagggtcgtgtccgtgctgactgtcctgcatcaggactggctgaacggaaaagagtataagtgcaaagtgagcaataagggcctgcccagttcaatcgagaaaacaatttccaaggcaaaaggccagcctcgggaaccacaggtgtataccctgccacccagcagagaggaaatgacaaagaaccaggtgtcactgagctgtgccgtcaaaggcttttaccctagcgatatcgctgtggagtgggaatccaatgggcagccagaaaacaattataagaccacacctccagtgctggacagcgatggatccttctttctggtgtccaagctgaccgtggacaaatctcggtggcagcagggcaacgtgttctcctgctctgtcatgcatgaggccctgcacaatcattacacccagaaaagtctgtcactgagcaagtcctgtgataaaacaggaggcgggggatctggcgggggaggcagtgggggaggcgggtccggaggaggaggaagcggaggaggaggatccggaggaggcgggtctggaggcgggggaagtggaggaggaggatcttgcccaagttgtccagcacctgagttcctgggaggaccatccgtgttcctgtttccccctaagcccaaagacaccctgatgatcagccggacacctgaagtgacttgcgtcgtggtggacgtgtcccaggaggatccagaggtccagtttaactggtatgtcgatggcgtggaggtccacaatgctaagaccaaacctcgcgaggaacagttcaactctgactaccgagtggtcagtgtgctgacagtcctgcatcaggattggctgaacgggaaggaatacaaatgtaaagtgagcaataagggactgccaagctccatcgagaagaccatcagcaaagccaaaggccagcccagggaacctcaggtgtacactctgccaccctcccgcgaggaaatgaccaagaaccaggtgtctctgtggtgtctggtcaaaggattttatccctctgacatcgccgtggagtgggaaagtaatggccagcctgaaaacaattacaagactacccctccagtgctggactcagatgggagcttctttctgtatagtaagctgaccgtggataaatcacggtggcagcagggaaatgtgttctcttgcagtgtcatgcacgaggccctgcataaccattacacacagaagtcattaagcttatcgggggaatgtggaggcggagggagcggcggaggcggcagcgatatcgtgatgacacagtcacccctgtcgctccctgtgactcccggagagcctgcgtccatctcgtgccggtcaacaaagtccctgctgcacagcgacggaattacgtatttgtactggtatttgcaaaaacccggacagagcccgcaattgttgatctaccagctctcaaaccttgcgagcggggtcccggatcgctttagctcgtcggggtcaggaactgacttcacactcaaaatctcaagggtcgaggccgaggatgaaggtgtctattactgcgctcagaatctcgaaatcccgcggacctttggttgcggtacgaagctggagatcaagcgaacgggaggcggtgggtccggtggcggtggttccggcggaggtggttcgggaggaggaggtagccaggtgcagcttgtccagtcgggagcagaggtaaagaagccaggagagtcggtgaaaatctcgtgtaaagcctcggggtacacattcacgaactacggcatgaattgggtgagacaagctcccgggcagtgtttgaaatggatgggatggattaacacctacacaggggaatccacatatgcggacgacttcaaggggaggttcgcgttttcacttgatacttcagcgagcacggcgtatctccaactgtcgtcgcttcgctccgaagataccgcagtatacttttgcgccagattcgcgattaaaggggactattggggacaggggacccttgtcacggtgtcatcatgataa

SEQ ID NO: 412 - protein, 976 aa, Artificial Sequence
  Description of Artificial Sequence: Synthetic polypeptide
QLQLQESGPGLVKPSETLSLTCTVSGGSISSSVYYWSWIRQPPGKGLEWIGVIYPSGNTYYSPSLKSRVTISVDTSKNQFSLKLSSVTAADTAVYYCARTIYDLFDIWGQGTMVTVSSASTKGPSVFPLAPSSKSTSGGTAALGCLVKDYFPEPVTVSWNSGALTSGVHTFPAVLQSSGLYSLSSVVTVPSSSLGTQTYICNVNHKPSNTKVDKKVEPKSCDKTHTCPSCPAPEFLGGPSVFLFPPKPKDTLMISRTPEVTCVVVDVSQEDPEVQFNWYVDGVEVHNAKTKPREEQFNSKYRVVSVLTVLHQDWLNGKEYKCKVSNKGLPSSIEKTISKAKGQPREPQVYTLPPSREEMTKNQVSLSCAVKGFYPSDIAVEWESNGQPENNYKTTPPVLDSDGSFFLVSKLTVDKSRWQQGNVFSCSVMHEALHNHYTQKSLSLSKSCDKTGGGGSGGGGSGGGGSGGGGSGGGGSGGGGSGGGGSGGGGSCPSCPAPEFLGGPSVFLFPPKPKDTLMISRTPEVTCVVVDVSQEDPEVQFNWYVDGVEVHNAKTKPREEQFNSDYRVVSVLTVLHQDWLNGKEYKCKVSNKGLPSSIEKTISKAKGQPREPQVYTLPPSREEMTKNQVSLWCLVKGFYPSDIAVEWESNGQPENNYKTTPPVLDSDGSFFLYSKLTVDKSRWQQGNVFSCSVMHEALHNHYTQKSLSLSGECGGGGSGGGGSQVQLVQSGAEVKKPGESVKISCKASGYTFTNYGMNWVRQAPGQGLKWMGWINTYTGESTYADDFKGRFAFSLDTSASTAYLQLSSLRSEDTAVYFCARFAIKGDYWGQGTLVTVSSASTGGGGSGGGGSGGGGSGGGGSDIVMTQSPLSLPVTPGEPASISCRSTKSLLHSDGITYLYWYLQKPGQSPQLLIYQMSNLASGVPDRFSSSGSGTDFTLKISRVEAEDEGVYYCAQNLEIPRTFGGGTKLEIKRT

SEQ ID NO: 413 - protein, 975 aa, Artificial Sequence
  Description of Artificial Sequence: Synthetic polypeptide
QLQLQESGPGLVKPSETLSLTCTVSGGSISSSVYYWSWIRQPPGKGLEWIGVIYPSGNTYYSPSLKSRVTISVDTSKNQFSLKLSSVTAADTAVYYCARTIYDLFDIWGQGTMVTVSSASTKGPSVFPLAPSSKSTSGGTAALGCLVKDYFPEPVTVSWNSGALTSGVHTFPAVLQSSGLYSLSSVVTVPSSSLGTQTYICNVNHKPSNTKVDKKVEPKSCDKTHTCPSCPAPEFLGGPSVFLFPPKPKDTLMISRTPEVTCVVVDVSQEDPEVQFNWYVDGVEVHNAKTKPREEQFNSKYRVVSVLTVLHQDWLNGKEYKCKVSNKGLPSSIEKTISKAKGQPREPQVYTLPPSREEMTKNQVSLSCAVKGFYPSDIAVEWESNGQPENNYKTTPPVLDSDGSFFLVSKLTVDKSRWQQGNVFSCSVMHEALHNHYTQKSLSLSKSCDKTGGGGSGGGGSGGGGSGGGGSGGGGSGGGGSGGGGSGGGGSCPSCPAPEFLGGPSVFLFPPKPKDTLMISRTPEVTCVVVDVSQEDPEVQFNWYVDGVEVHNAKTKPREEQFNSDYRVVSVLTVLHQDWLNGKEYKCKVSNKGLPSSIEKTISKAKGQPREPQVYTLPPSREEMTKNQVSLWCLVKGFYPSDIAVEWESNGQPENNYKTTPPVLDSDGSFFLYSKLTVDKSRWQQGNVFSCSVMHEALHNHYTQKSLSLSGECGGGGSGGGGSQVQLQQSGGGLVKPGESVKISCAASGYTFTNYGMNWVKQAPGKGLKWMGWINTYTGESTYADDFKGRFTFSLETSASAAYLQINSLRPEDTAVYFCARFAIKGDYWGQGTTVTVSSASTGGGGSGGGGSGGGGSGGGGSGDIVMTQSPSSLSASVGDKATITCRSTKSLLHSNGITYLYWYLQKPGKAPKLLIYQMSNLASGVPDRFSSSGSGTEFTLTISSVQPEDEGTYYCAQNLEIPRTFGQGTKLEIK

SEQ ID NO: 414 - protein, 975 aa, Artificial Sequence
  Description of Artificial Sequence: Synthetic polypeptide
QLQLQESGPGLVKPSETLSLTCTVSGGSISSSVYYWSWIRQPPGKGLEWIGVIYPSGNTYYSPSLKSRVTISVDTSKNQFSLKLSSVTAADTAVYYCARTIYDLFDIWGQGTMVTVSSASTKGPSVFPLAPSSKSTSGGTAALGCLVKDYFPEPVTVSWNSGALTSGVHTFPAVLQSSGLYSLSSVVTVPSSSLGTQTYICNVNHKPSNTKVDKKVEPKSCDKTHTCPSCPAPEFLGGPSVFLFPPKPKDTLMISRTPEVTCVVVDVSQEDPEVQFNWYVDGVEVHNAKTKPREEQFNSKYRVVSVLTVLHQDWLNGKEYKCKVSNKGLPSSIEKTISKAKGQPREPQVYTLPPSREEMTKNQVSLSCAVKGFYPSDIAVEWESNGQPENNYKTTPPVLDSDGSFFLVSKLTVDKSRWQQGNVFSCSVMHEALHNHYTQKSLSLSKSCDKTGGGGSGGGGSGGGGSGGGGSGGGGSGGGGSGGGGSGGGGSCPSCPAPEFLGGPSVFLFPPKPKDTLMISRTPEVTCVVVDVSQEDPEVQFNWYVDGVEVHNAKTKPREEQFNSDYRVVSVLTVLHQDWLNGKEYKCKVSNKGLPSSIEKTISKAKGQPREPQVYTLPPSREEMTKNQVSLWCLVKGFYPSDIAVEWESNGQPENNYKTTPPVLDSDGSFFLYSKLTVDKSRWQQGNVFSCSVMHEALHNHYTQKSLSLSGECGGGGSGGGGSQVQLQQSGGGLVKPGESVKISCAASGYTFTNYGMNWVKQAPGKGLKWMGWINTYTGESTYADDFKGRFTFSLETSASAAYLQINSLRPEDTAVYFCARFAIKGDYWGQGTTVTVSSASTGGGGSGGGGSGGGGSGGGGSGDIVMTQSPSSLSASVGDKATITCRSTKSLLHSDGITYLYWYLQKPGKAPKLLIYQLSNLASGVPDRFSSSGSGTEFTLTISSVQPEDEGTYYCAQNLEIPRTFGQGTKLEIK

SEQ ID NO: 415 - protein, 974 aa, Artificial Sequence
  Description of Artificial Sequence: Synthetic polypeptide
QLQLQESGPGLVKPSETLSLTCTVSGGSISSSVYYWSWIRQPPGKGLEWIGVIYPSGNTYYSPSLKSRVTISVDTSKNQFSLKLSSVTAADTAVYYCARTIYDLFDIWGQGTMVTVSSASTKGPSVFPLAPSSKSTSGGTAALGCLVKDYFPEPVTVSWNSGALTSGVHTFPAVLQSSGLYSLSSVVTVPSSSLGTQTYICNVNHKPSNTKVDKKVEPKSCDKTHTCPSCPAPEFLGGPSVFLFPPKPKDTLMISRTPEVTCVVVDVSQEDPEVQFNWYVDGVEVHNAKTKPREEQFNSKYRVVSVLTVLHQDWLNGKEYKCKVSNKGLPSSIEKTISKAKGQPREPQVYTLPPSREEMTKNQVSLSCAVKGFYPSDIAVEWESNGQPENNYKTTPPVLDSDGSFFLVSKLTVDKSRWQQGNVFSCSVMHEALHNHYTQKSLSLSKSCDKTGGGGSGGGGSGGGGSGGGGSGGGGSGGGGSGGGGSGGGGSCPSCPAPEFLGGPSVFLFPPKPKDTLMISRTPEVTCVVVDVSQEDPEVQFNWYVDGVEVHNAKTKPREEQFNSDYRVVSVLTVLHQDWLNGKEYKCKVSNKGLPSSIEKTISKAKGQPREPQVYTLPPSREEMTKNQVSLWCLVKGFYPSDIAVEWESNGQPENNYKTTPPVLDSDGSFFLYSKLTVDKSRWQQGNVFSCSVMHEALHNHYTQKSLSLSGECGGGGSGGGGSDIVMTQSPSSLSASVGDKATITCRSTKSLLHSNGITYLYWYLQKPGKAPKLLIYQMSNLASGVPDRFSSSGSGTEFTLTISSVQPEDEGTYYCAQNLEIPRTFGQGTKLEIKRTGGGGSGGGGSGGGGSGGGGSGQVQLQQSGGGLVKPGESVKISCAASGYTFTNYGMNWVKQAPGKGLKWMGWINTYTGESTYADDFKGRFTFSLETSASAAYLQINSLRPEDTAVYFCARFAIKGDYWGQGTTVTVSS

SEQ ID NO: 416 - protein, 974 aa, Artificial Sequence
  Description of Artificial Sequence: Synthetic polypeptide
QLQLQESGPGLVKPSETLSLTCTVSGGSISSSVYYWSWIRQPPGKGLEWIGVIYPSGNTYYSPSLKSRVTISVDTSKNQFSLKLSSVTAADTAVYYCARTIYDLFDIWGQGTMVTVSSASTKGPSVFPLAPSSKSTSGGTAALGCLVKDYFPEPVTVSWNSGALTSGVHTFPAVLQSSGLYSLSSVVTVPSSSLGTQTYICNVNHKPSNTKVDKKVEPKSCDKTHTCPSCPAPEFLGGPSVFLFPPKPKDTLMISRTPEVTCVVVDVSQEDPEVQFNWYVDGVEVHNAKTKPREEQFNSKYRVVSVLTVLHQDWLNGKEYKCKVSNKGLPSSIEKTISKAKGQPREPQVYTLPPSREEMTKNQVSLSCAVKGFYPSDIAVEWESNGQPENNYKTTPPVLDSDGSFFLVSKLTVDKSRWQQGNVFSCSVMHEALHNHYTQKSLSLSKSCDKTGGGGSGGGGSGGGGSGGGGSGGGGSGGGGSGGGGSGGGGSCPSCPAPEFLGGPSVFLFPPKPKDTLMISRTPEVTCVVVDVSQEDPEVQFNWYVDGVEVHNAKTKPREEQFNSDYRVVSVLTVLHQDWLNGKEYKCKVSNKGLPSSIEKTISKAKGQPREPQVYTLPPSREEMTKNQVSLWCLVKGFYPSDIAVEWESNGQPENNYKTTPPVLDSDGSFFLYSKLTVDKSRWQQGNVFSCSVMHEALHNHYTQKSLSLSGECGGGGSGGGGSDIVMTQSPSSLSASVGDKATITCRSTKSLLHSDGITYLYWYLQKPGKAPKLLIYQLSNLASGVPDRFSSSGSGTEFTLTISSVQPEDEGTYYCAQNLEIPRTFGQGTKLEIKRTGGGGSGGGGSGGGGSGGGGSGQVQLQQSGGGLVKPGESVKISCAASGYTFTNYGMNWVKQAPGKGLKWMGWINTYTGESTYADDFKGRFTFSLETSASAAYLQINSLRPEDTAVYFCARFAIKGDYWGQGTTVTVSS

SEQ ID NO: 417 - protein, 976 aa, Artificial Sequence
  Description of Artificial Sequence: Synthetic polypeptide
QLQLQESGPGLVKPSETLSLTCTVSGGSISSSVYYWSWIRQPPGKGLEWIGVIYPSGNTYYSPSLKSRVTISVDTSKNQFSLKLSSVTAADTAVYYCARTIYDLFDIWGQGTMVTVSSASTKGPSVFPLAPSSKSTSGGTAALGCLVKDYFPEPVTVSWNSGALTSGVHTFPAVLQSSGLYSLSSVVTVPSSSLGTQTYICNVNHKPSNTKVDKKVEPKSCDKTHTCPSCPAPEFLGGPSVFLFPPKPKDTLMISRTPEVTCVVVDVSQEDPEVQFNWYVDGVEVHNAKTKPREEQFNSKYRVVSVLTVLHQDWLNGKEYKCKVSNKGLPSSIEKTISKAKGQPREPQVYTLPPSREEMTKNQVSLSCAVKGFYPSDIAVEWESNGQPENNYKTTPPVLDSDGSFFLVSKLTVDKSRWQQGNVFSCSVMHEALHNHYTQKSLSLSKSCDKTGGGGSGGGGSGGGGSGGGGSGGGGSGGGGSGGGGSGGGGSCPSCPAPEFLGGPSVFLFPPKPKDTLMISRTPEVTCVVVDVSQEDPEVQFNWYVDGVEVHNAKTKPREEQFNSDYRVVSVLTVLHQDWLNGKEYKCKVSNKGLPSSIEKTISKAKGQPREPQVYTLPPSREEMTKNQVSLWCLVKGFYPSDIAVEWESNGQPENNYKTTPPVLDSDGSFFLYSKLTVDKSRWQQGNVFSCSVMHEALHNHYTQKSLSLSGECGGGGSGGGGSDIVMTQSPSSLSASVGDKATITCRSTKSLLHSNGITYLYWYLQKPGKAPKLLIYQMSNLASGVPDRFSSSGSGTEFTLTISSVQPEDEGTYYCAQNLEIPRTFGQGTKLEIKRTPSHNSHQVPSAGGPTANSGTSGSQVQLQQSGGGLVKPGESVKISCAASGYTFTNYGMNWVKQAPGKGLKWMGWINTYTGESTYADDFKGRFTFSLETSASAAYLQINSLRPEDTAVYFCARFAIKGDYWGQGTTVTVSS

SEQ ID NO: 418 - DNA, 2934 bp, Artificial Sequence
  Description of Artificial Sequence: Synthetic polynucleotide
cagctgcagctgcaggagagcggacccggactggtcaagccctccgagacactgtctctgacctgcacagtgtcaggcgggagcatcagctcctctgtctactattggtcttggattcggcagccccctggaaagggcctggaatggatcggcgtgatctacccaagtgggaacacttactattctcccagtctgaaatccagagtgaccatcagtgtcgacacatcaaagaatcagttcagcctgaaactgagttcagtgacagccgctgatactgcagtctactattgtgccaggaccatctatgacctgtttgatatttgggggcagggaactatggtgaccgtcagctccgctagcactaagggaccttccgtgttcccactggccccctcaagcaaatctaccagtgggggaacagcagccctgggctgtctggtgaaggattactttccagagcccgtgaccgtcagttggaactcaggggctctgactagcggagtgcacaccttccccgcagtcctgcagtcctctgggctgtactccctgagttcagtggtcactgtgcccagctcctctctgggaacacagacttatatctgcaacgtgaatcacaagccttccaataccaaagtcgacaagaaagtcgagcctaagtcatgtgataaaacccatacatgcccaagctgtcctgcaccagaatttctgggaggaccaagcgtgttcctgtttccacctaagcctaaagacaccctgatgattagtcgcactccagaggtgacctgtgtggtcgtggacgtcagccaggaggatcccgaagtgcagtttaactggtacgtcgatggcgtggaagtccacaatgctaagacaaaaccaagagaggaacagttcaacagcaagtacagggtcgtgtccgtgctgactgtcctgcatcaggactggctgaacggaaaagagtataagtgcaaagtgagcaataagggcctgcccagttcaatcgagaaaacaatttccaaggcaaaaggccagcctcgggaaccacaggtgtataccctgccacccagcagagaggaaatgacaaagaaccaggtgtcactgagctgtgccgtcaaaggcttttaccctagcgatatcgctgtggagtgggaatccaatgggcagccagaaaacaattataagaccacacctccagtgctggacagcgatggatccttctttctggtgtccaagctgaccgtggacaaatctcggtggcagcagggcaacgtgttctcctgctctgtcatgcatgaggccctgcacaatcattacacccagaaaagtctgtcactgagcaagtcctgtgataaaacaggaggcgggggatctggcgggggaggcagtgggggaggcgggtccggaggaggaggaagcggaggaggaggatccggaggaggcgggtctggaggcgggggaagtggaggaggaggatcttgcccaagttgtccagcacctgagttcctgggaggaccatccgtgttcctgtttccccctaagcccaaagacaccctgatgatcagccggacacctgaagtgacttgcgtcgtggtggacgtgtcccaggaggatccagaggtccagtttaactggtatgtcgatggcgtggaggtccacaatgctaagaccaaacctcgcgaggaacagttcaactctgactaccgagtggtcagtgtgctgacagtcctgcatcaggattggctgaacgggaaggaatacaaatgtaaagtgagcaataagggactgccaagctccatcgagaagaccatcagcaaagccaaaggccagcccagggaacctcaggtgtacactctgccaccctcccgcgaggaaatgaccaagaaccaggtgtctctgtggtgtctggtcaaaggattttatccctctgacatcgccgtggagtgggaaagtaatggccagcctgaaaacaattacaagactacccctccagtgctggactcagatgggagcttctttctgtatagtaagctgaccgtggataaatcacggtggcagcagggaaatgtgttctcttgcagtgtcatgcacgaggccctgcataaccattacacacagaagtcattaagcttatcgggagagtgcggtggcggagggagcggaggaggcgggtcggacatcgtcatgacccagtcaccgtcctcactgtcggcgtcggtgggtgataaggccacaattacatgccgcagcacgaaatcactgctccactccaatgggattacatatctctattggtatctccaaaaacccggaaaggcacctaagttgctgatctaccagatgtcgaacttggcatcgggagtacccgataggttctcgtcgtcgggaagcggcacggagttcacgctcaccatttcctcagtccagccggaggacgaaggaacttactactgcgctcagaatcttgaaatcccgcgcacatttggacaagggacgaaacttgaaatcaagcgaactccgtcccacaacagccatcaagtgccctcggcgggagggcccaccgccaattcggggacatcagggagccaggtacagttgcagcagtcgggaggcgggctggtaaaacctggtgaaagcgtcaagatctcatgtgcagcctcagggtatacgttcaccaattacgggatgaactgggtgaagcaggcgccagggaaaggtcttaagtggatgggatggatcaacacttacacgggagagtccacatacgcggatgactttaaggggcggttcacgttttcgttggagacttcagcgtccgctgcctacctccaaatcaactcccttagacccgaggacacagcggtctatttctgtgcgcggtttgccattaaaggtgattattggggacagggtacgactgtgaccgtgtccagctgataa

SEQ ID NO: 419 - protein, 943 aa, Artificial Sequence
  Description of Artificial Sequence: Synthetic polypeptide
MGAPAVLAPGILVLLFTLVQRSNGECKEALAKSEMNVNMKYQLPNFTAETPIQNVILHEHHIFLGATNYIYVLNEEDLQKVAEYKTGPVLEHPDCFPCQDCSSKANLSGGVWKDNINMALVVDTYYDDQLISCGSVNRGTCQRHVFPHNHTADIQSEVHCIFSPQIEEPSQCPDCVVSALGAKVLSSVKDRFINFFVGNTINSSYFPDHPLHSISVRRLKETKDGFMFLTDQSYIDVLPEFRDSYPIKYVHAFESNNFIYFLTVQRETLDAQTFHTRIIRFCSINSGLHSYMEMPLECILTEKRKKRSTKKEVFNILQAAYVSKPGAQLARQIGASLNDDILFGVFAQSKPDSAEPMDRSAMCAFPIKYVNDFFNKIVNKNNVRCLQHFYGPNHEHCFNRTLLRNSSGCEARRDEYRTEFTTALQRVDLFMGQFSEVLLTSISTFIKGDLTIANLGTSEGRFMQVVVSRSGPSTPHVNFLLDSHPVSPEVIVEHTLNQNGYTLVITGKKITKIPLNGLGCRHFQSCSQCLSAPPFVQCGWCHDKCVRSEECLSGTWTQQICLPAIYKVFPNSAPLEGGTRLTICGWDFGFRRNNKFDLKKTRVLLGNESCTLTLSESTMNTLKCTVGPAMNKHFNMSIIISNGHGTTQYSTFSYVDPVITSISPKYGPMAGGTLLTLTGNYLNSGNSRHISIGGKTCTLKSVSNSILECYTPAQTISTEFAVKLKIDLANRETSIFSYREDPIVYEIHPTKSFISGGSTITGVGKNLNSVSVPRMVINVHEAGRNFTVACQHRSNSEIICCTTPSLQQLNLQLPLKTKAFFMLDGILSKYFDLIYVHNPVFKPFEKPVMISMGNENVLEIKGNDIDPEAVKGEVLKVGNKSCENIHLHSEAVLCTVPNDLLKLNSELNIEWKQAISSTVLGKVIVQPDQNFTGGGGSHHHHHH

SEQ ID NO: 420 - protein, 508 aa, Artificial Sequence
  Description of Artificial Sequence: Synthetic polypeptide
MGWSLILLFLVAVATRVLSQEECVCENYKLAVNCFVNNNRQCQCTSVGAQNTVICSKLAAKCLVMKAEMNGSKLGRRAKPEGALQNNDGLYDPDCDESGLFKAKQCNGTSMCWCVNTAGVRRTDKDTEITCSERVRTYWIIIELKHKAREKPYDSKSLRTALQKEITTRYQLDPKFITSILYENNVITIDLVQNSSQKTQNDVDIADVAYYFEKDVKGESLFHSKKMDLTVNGEQLDLDPGQTLIYYVDEKAPEFSMQGLKIEGRMDPKSSDKTHTCPPCPAPELLGGPSVFLFPPKPKDTLMISRTPEVTCVVVDVSHEDPEVKFNWYVDGVEVHNAKTKPREEQYNSTYRVVSVLTVLHQDWLNGKEYKCKVSNKALPAPIEKTISKAKGQPREPQVYTLPPSRDELTKNQVSLTCLVKGFYPSDIAVEWESNGQPENNYKTTPPVLDSDGSFFLYSKLTVDKSRWQQGNVFSCSVMHEALHNHYTQKSLSLSPGGGGGSHHHHHH

SEQ ID NO: 421 - protein, 119 aa, Artificial Sequence [sequence omitted]

SEQ ID NO: 422 - protein, 114 aa, Artificial Sequence
  Description of Artificial Sequence: Synthetic polypeptide
DIQMTQSPSSLSASVGDRVTITCKSSQSLLYTSSQKNYLAWYQQKPGKAPKLLIYWASTRESGVPSRFSGSGSGTDFTLTISSLQPEDFATYYCQQYYAYPWTFGQGTKVEIKR

SEQ ID NO: 423-424 - skipped (2 entries)

SEQ ID NO: 425 - protein, 974 aa, Artificial Sequence
  Description of Artificial Sequence: Synthetic polypeptide
EVQLVESGGGLVQPGGSLRLSCAASGYTFTSYWLHWVRQAPGKGLEWVGMIDPSNSDTRFNPNFKDRFTISADTSKNTAYLQMNSLRAEDTAVYYCATYRSYVTPLDYWGQGTLVTVSSASTKGPSVFPLAPSSKSTSGGTAALGCLVKDYFPEPVTVSWNSGALTSGVHTFPAVLQSSGLYSLSSVVTVPSSSLGTQTYICNVNHKPSNTKVDKKVEPKSCDKTHTCPSCPAPEFLGGPSVFLFPPKPKDTLMISRTPEVTCVVVDVSQEDPEVQFNWYVDGVEVHNAKTKPREEQFNSKYRVVSVLTVLHQDWLNGKEYKCKVSNKGLPSSIEKTISKAKGQPREPQVYTLPPSREEMTKNQVSLSCAVKGFYPSDIAVEWESNGQPENNYKTTPPVLDSDGSFFLVSKLTVDKSRWQQGNVFSCSVMHEALHNHYTQKSLSLSKSCDKTGGGGSGGGGSGGGGSGGGGSGGGGSGGGGSGGGGSGGGGSCPSCPAPEFLGGPSVFLFPPKPKDTLMISRTPEVTCVVVDVSQEDPEVQFNWYVDGVEVHNAKTKPREEQFNSDYRVVSVLTVLHQDWLNGKEYKCKVSNKGLPSSIEKTISKAKGQPREPQVYTLPPSREEMTKNQVSLWCLVKGFYPSDIAVEWESNGQPENNYKTTPPVLDSDGSFFLYSKLTVDKSRWQQGNVFSCSVMHEALHNHYTQKSLSLSGECGGGGSGGGGSDIVMTQSPLSLPVTPGEPASISCRSTKSLLHSNGITYLYWYLQKPGQSPQLLIYQMSNLASGVPDRFSSSGSGTDFTLKISRVEAEDEGVYYCAQNLEIPRTFGGGTKLEIKRTGGGGSGGGGSGGGGSGGGGSQVQLVQSGAEVKKPGESVKISCKASGYTFTNYGMNWVRQAPGQGLKWMGWINTYTGESTYADDFKGRFAFSLDTSASTAYLQLSSLRSEDTAVYFCARFAIKGDYWGQGTLVTVSS

SEQ ID NO: 426 - protein, 975 aa, Artificial Sequence
  Description of Artificial Sequence: Synthetic polypeptide
EVQLVESGGGLVQPGGSLRLSCAASGYTFTSYWLHWVRQAPGKGLEWVGMIDPSNSDTRFNPNFKDRFTISADTSKNTAYLQMNSLRAEDTAVYYCATYRSYVTPLDYWGQGTLVTVSSASTKGPSVFPLAPSSKSTSGGTAALGCLVKDYFPEPVTVSWNSGALTSGVHTFPAVLQSSGLYSLSSVVTVPSSSLGTQTYICNVNHKPSNTKVDKKVEPKSCDKTHTCPSCPAPEFLGGPSVFLFPPKPKDTLMISRTPEVTCVVVDVSQEDPEVQFNWYVDGVEVHNAKTKPREEQFNSKYRVVSVLTVLHQDWLNGKEYKCKVSNKGLPSSIEKTISKAKGQPREPQVYTLPPSREEMTKNQVSLSCAVKGFYPSDIAVEWESNGQPENNYKTTPPVLDSDGSFFLVSKLTVDKSRWQQGNVFSCSVMHEALHNHYTQKSLSLSKSCDKTGGGGSGGGGSGGGGSGGGGSGGGGSGGGGSGGGGSGGGGSCPSCPAPEFLGGPSVFLFPPKPKDTLMISRTPEVTCVVVDVSQEDPEVQFNWYVDGVEVHNAKTKPREEQFNSDYRVVSVLTVLHQDWLNGKEYKCKVSNKGLPSSIEKTISKAKGQPREPQVYTLPPSREEMTKNQVSLWCLVKGFYPSDIAVEWESNGQPENNYKTTPPVLDSDGSFFLYSKLTVDKSRWQQGNVFSCSVMHEALHNHYTQKSLSLSGECGGGGSGGGGSQVQLVQSGSELKKPGESVKVSCKASGYTFTNYGMHWVRQAPGQGLKWMGWINTYTGESTYADDFKGRFAFSLDTSASTAYLQISSLKAEDTAVYFCARFAIKGDYWGQGTLVTVSSASTGGGGSGGGGSGGGGSGGGGSDIVMTQSPLSLPVTPGEPASISCRSTKSLLHSDGITYLYWYLQKPGQSPQLLIYQLSNLASGVPDRFSSSGSGTDFTLKISRVEAEDEGVYYCAQNLEIPYTFGQGTKVEIK

SEQ ID NO: 427 - protein, 975 aa, Artificial Sequence
  Description of Artificial Sequence: Synthetic polypeptide
EVQLVESGGGLVQPGGSLRLSCAASGYTFTSYWLHWVRQAPGKGLEWVGMIDPSNSDTRFNPNFKDRFTISADTSKNTAYLQMNSLRAEDTAVYYCATYRSYVTPLDYWGQGTLVTVSSASTKGPSVFPLAPSSKSTSGGTAALGCLVKDYFPEPVTVSWNSGALTSGVHTFPAVLQSSGLYSLSSVVTVPSSSLGTQTYICNVNHKPSNTKVDKKVEPKSCDKTHTCPSCPAPEFLGGPSVFLFPPKPKDTLMISRTPEVTCVVVDVSQEDPEVQFNWYVDGVEVHNAKTKPREEQFNSKYRVVSVLTVLHQDWLNGKEYKCKVSNKGLPSSIEKTISKAKGQPREPQVYTLPPSREEMTKNQVSLSCAVKGFYPSDIAVEWESNGQPENNYKTTPPVLDSDGSFFLVSKLTVDKSRWQQGNVFSCSVMHEALHNHYTQKSLSLSKSCDKTGGGGSGGGGSGGGGSGGGGSGGGGSGGGGSGGGGSGGGGSCPSCPAPEFLGGPSVFLFPPKPKDTLMISRTPEVTCVVVDVSQEDPEVQFNWYVDGVEVHNAKTKPREEQFNSDYRVVSVLTVLHQDWLNGKEYKCKVSNKGLPSSIEKTISKAKGQPREPQVYTLPPSREEMTKNQVSLWCLVKGFYPSDIAVEWESNGQPENNYKTTPPVLDSDGSFFLYSKLTVDKSRWQQGNVFSCSVMHEALHNHYTQKSLSLSGECGGGGSGGGGSQVQLVQSGSELKKPGESVKVSCKASGYTFTNYGMNWVRQAPGQGLKWMGWINTYTGESTYADDFKGRFAFSLDTSASTAYLQISSLKAEDTAVYFCARFAIKGDYWGQGTLVTVSSASTGGGGSGGGGSGGGGSGGGGSDIVMTQSPLSLPVTPGEPASISCRSTKSLLHSDGITYLYWYLQKPGQSPQLLIYQLSNLASGVPDRFSSSGSGTDFTLKISRVEAEDEGVYYCAQNLEIPRTFGQGTKVEIK

SEQ ID NO: 428 - protein, 975 aa, Artificial Sequence
  Description of Artificial Sequence: Synthetic polypeptide
EVQLVESGGGLVQPGGSLRLSCAASGYTFTSYWLHWVRQAPGKGLEWVGMIDPSNSDTRFNPNFKDRFTISADTSKNTAYLQMNSLRAEDTAVYYCATYRSYVTPLDYWGQGTLVTVSSASTKGPSVFPLAPSSKSTSGGTAALGCLVKDYFPEPVTVSWNSGALTSGVHTFPAVLQSSGLYSLSSVVTVPSSSLGTQTYICNVNHKPSNTKVDKKVEPKSCDKTHTCPSCPAPEFLGGPSVFLFPPKPKDTLMISRTPEVTCVVVDVSQEDPEVQFNWYVDGVEVHNAKTKPREEQFNSKYRVVSVLTVLHQDWLNGKEYKCKVSNKGLPSSIEKTISKAKGQPREPQVYTLPPSREEMTKNQVSLSCAVKGFYPSDIAVEWESNGQPENNYKTTPPVLDSDGSFFLVSKLTVDKSRWQQGNVFSCSVMHEALHNHYTQKSLSLSKSCDKTGGGGSGGGGSGGGGSGGGGSGGGGSGGGGSGGGGSGGGGSCPSCPAPEFLGGPSVFLFPPKPKDTLMISRTPEVTCVVVDVSQEDPEVQFNWYVDGVEVHNAKTKPREEQFNSDYRVVSVLTVLHQDWLNGKEYKCKVSNKGLPSSIEKTISKAKGQPREPQVYTLPPSREEMTKNQVSLWCLVKGFYPSDIAVEWESNGQPENNYKTTPPVLDSDGSFFLYSKLTVDKSRWQQGNVFSCSVMHEALHNHYTQKSLSLSGECGGGGSGGGGSDIVMTQSPLSLPVTPGEPASISCRSTKSLLHSDGITYLYWYLQKPGQSPQLLIYQLSNLASGVPDRFSSSGSGTDFTLKISRVEAEDEGVYYCAQNLEIPRTFGQGTKVEIKRTGGGGSGGGGSGGGGSGGGGSGQVQLVQSGSELKKPGESVKVSCKASGYTFTNYGMNWVRQAPGQGLKWMGWINTYTGESTYADDFKGRFAFSLDTSASTAYLQISSLKAEDTAVYFCARFAIKGDYWGQGTLVTVSS

SEQ ID NO: 429 - protein, 974 aa, Artificial Sequence; identical to SEQ ID NO: 425
  Description of Artificial Sequence: Synthetic polypeptide

SEQ ID NO: 430 - protein, 974 aa, Artificial Sequence
  Description of Artificial Sequence: Synthetic polypeptide
EVQLVESGGGLVQPGGSLRLSCAASGYTFTSYWLHWVRQAPGKGLEWVGMIDPSNSDTRFNPNFKDRFTISADTSKNTAYLQMNSLRAEDTAVYYCATYRSYVTPLDYWGQGTLVTVSSASTKGPSVFPLAPSSKSTSGGTAALGCLVKDYFPEPVTVSWNSGALTSGVHTFPAVLQSSGLYSLSSVVTVPSSSLGTQTYICNVNHKPSNTKVDKKVEPKSCDKTHTCPSCPAPEFLGGPSVFLFPPKPKDTLMISRTPEVTCVVVDVSQEDPEVQFNWYVDGVEVHNAKTKPREEQFNSKYRVVSVLTVLHQDWLNGKEYKCKVSNKGLPSSIEKTISKAKGQPREPQVYTLPPSREEMTKNQVSLSCAVKGFYPSDIAVEWESNGQPENNYKTTPPVLDSDGSFFLVSKLTVDKSRWQQGNVFSCSVMHEALHNHYTQKSLSLSKSCDKTGGGGSGGGGSGGGGSGGGGSGGGGSGGGGSGGGGSGGGGSCPSCPAPEFLGGPSVFLFPPKPKDTLMISRTPEVTCVVVDVSQEDPEVQFNWYVDGVEVHNAKTKPREEQFNSDYRVVSVLTVLHQDWLNGKEYKCKVSNKGLPSSIEKTISKAKGQPREPQVYTLPPSREEMTKNQVSLWCLVKGFYPSDIAVEWESNGQPENNYKTTPPVLDSDGSFFLYSKLTVDKSRWQQGNVFSCSVMHEALHNHYTQKSLSLSGECGGGGSGGGGSDIVMTQSPLSLPVTPGEPASISCRSTKSLLHSDGITYLYWYLQKPGQSPQLLIYQLSNLASGVPDRFSSSGSGTDFTLKISRVEAEDEGVYYCAQNLEIPRTFGGGTKLEIKRTGGGGSGGGGSGGGGSGGGGSQVQLVQSGAEVKKPGESVKISCKASGYTFTNYGMNWVRQAPGQGLKWMGWINTYTGESTYADDFKGRFAFSLDTSASTAYLQLSSLRSEDTAVYFCARFAIKGDYWGQGTLVTVSS

SEQ ID NO: 431 - protein, 974 aa, Artificial Sequence
  Description of Artificial Sequence: Synthetic polypeptide
EVQLVESGGGLVQPGGSLRLSCAASGYTFTSYWLHWVRQAPGKGLEWVGMIDPSNSDTRFNPNFKDRFTISADTSKNTAYLQMNSLRAEDTAVYYCATYRSYVTPLDYWGQGTLVTVSSASTKGPSVFPLAPSSKSTSGGTAALGCLVKDYFPEPVTVSWNSGALTSGVHTFPAVLQSSGLYSLSSVVTVPSSSLGTQTYICNVNHKPSNTKVDKKVEPKSCDKTHTCPSCPAPEFLGGPSVFLFPPKPKDTLMISRTPEVTCVVVDVSQEDPEVQFNWYVDGVEVHNAKTKPREEQFNSKYRVVSVLTVLHQDWLNGKEYKCKVSNKGLPSSIEKTISKAKGQPREPQVYTLPPSREEMTKNQVSLSCAVKGFYPSDIAVEWESNGQPENNYKTTPPVLDSDGSFFLVSKLTVDKSRWQQGNVFSCSVMHEALHNHYTQKSLSLSKSCDKTGGGGSGGGGSGGGGSGGGGSGGGGSGGGGSGGGGSGGGGSCPSCPAPEFLGGPSVFLFPPKPKDTLMISRTPEVTCVVVDVSQEDPEVQFNWYVDGVEVHNAKTKPREEQFNSDYRVVSVLTVLHQDWLNGKEYKCKVSNKGLPSSIEKTISKAKGQPREPQVYTLPPSREEMTKNQVSLWCLVKGFYPSDIAVEWESNGQPENNYKTTPPVLDSDGSFFLYSKLTVDKSRWQQGNVFSCSVMHEALHNHYTQKSLSLSGECGGGGSGGGGSDIVMTQSPLSLPVTPGEPASISCRSTKSLLHSDGITYLYWYLQKPGQSPQLLIYQLSNLASGVPDRFSSSGSGTDFTLKISRVEAEDEGVYYCAQNLEIPRTFGCGTKLEIKRTGGGGSGGGGSGGGGSGGGGSQVQLVQSGAEVKKPGESVKISCKASGYTFTNYGMNWVRQAPGQCLKWMGWINTYTGESTYADDFKGRFAFSLDTSASTAYLQLSSLRSEDTAVYFCARFAIKGDYWGQGTLVTVSS

SEQ ID NO: 432 - protein, 977 aa, Artificial Sequence
  Description of Artificial Sequence: Synthetic polypeptide
EVQLVESGGGLVQPGGSLRLSCAASGYTFTSYWLHWVRQAPGKGLEWVGMIDPSNSDTRFNPNFKDRFTISADTSKNTAYLQMNSLRAEDTAVYYCATYRSYVTPLDYWGQGTLVTVSSASTKGPSVFPLAPSSKSTSGGTAALGCLVKDYFPEPVTVSWNSGALTSGVHTFPAVLQSSGLYSLSSVVTVPSSSLGTQTYICNVNHKPSNTKVDKKVEPKSCDKTHTCPSCPAPEFLGGPSVFLFPPKPKDTLMISRTPEVTCVVVDVSQEDPEVQFNWYVDGVEVHNAKTKPREEQFNSKYRVVSVLTVLHQDWLNGKEYKCKVSNKGLPSSIEKTISKAKGQPREPQVYTLPPSREEMTKNQVSLSCAVKGFYPSDIAVEWESNGQPENNYKTTPPVLDSDGSFFLVSKLTVDKSRWQQGNVFSCSVMHEALHNHYTQKSLSLSKSCDKTGGGGSGGGGSGGGGSGGGGSGGGGSGGGGSGGGGSGGGGSCPSCPAPEFLGGPSVFLFPPKPKDTLMISRTPEVTCVVVDVSQEDPEVQFNWYVDGVEVHNAKTKPREEQFNSDYRVVSVLTVLHQDWLNGKEYKCKVSNKGLPSSIEKTISKAKGQPREPQVYTLPPSREEMTKNQVSLWCLVKGFYPSDIAVEWESNGQPENNYKTTPPVLDSDGSFFLYSKLTVDKSRWQQGNVFSCSVMHEALHNHYTQKSLSLSGECGGGGSGGGGSQVQLVQSGAEVKKPGESVKISCKASGYTFTNYGMNWVRQAPGQGLKWMGWINTYTGESTYADDFKGRFAFSLDTSASTAYLQLSSLRSEDTAVYFCARFAIKGDYWGQGTLVTVSSASTGGGGSGGGGSGGGGSGGGGSDIVMTQSPLSLPVTPGEPASISCRSTKSLLHSDGITYLYWYLQKPGQSPQLLIYQMSNLASGVPDRFSSSGSGTDFTLKISRVEAEDEGVYYCAQNLEIPRTFGGGTKLEIKRT

SEQ ID NO: 433 - protein, 976 aa, Artificial Sequence
  Description of Artificial Sequence: Synthetic polypeptide
EVQLVESGGGLVQPGGSLRLSCAASGYTFTSYWLHWVRQAPGKGLEWVGMIDPSNSDTRFNPNFKDRFTISADTSKNTAYLQMNSLRAEDTAVYYCATYRSYVTPLDYWGQGTLVTVSSASTKGPSVFPLAPSSKSTSGGTAALGCLVKDYFPEPVTVSWNSGALTSGVHTFPAVLQSSGLYSLSSVVTVPSSSLGTQTYICNVNHKPSNTKVDKKVEPKSCDKTHTCPSCPAPEFLGGPSVFLFPPKPKDTLMISRTPEVTCVVVDVSQEDPEVQFNWYVDGVEVHNAKTKPREEQFNSKYRVVSVLTVLHQDWLNGKEYKCKVSNKGLPSSIEKTISKAKGQPREPQVYTLPPSREEMTKNQVSLSCAVKGFYPSDIAVEWESNGQPENNYKTTPPVLDSDGSFFLVSKLTVDKSRWQQGNVFSCSVMHEALHNHYTQKSLSLSKSCDKTGGGGSGGGGSGGGGSGGGGSGGGGSGGGGSGGGGSGGGGSCPSCPAPEFLGGPSVFLFPPKPKDTLMISRTPEVTCVVVDVSQEDPEVQFNWYVDGVEVHNAKTKPREEQFNSDYRVVSVLTVLHQDWLNGKEYKCKVSNKGLPSSIEKTISKAKGQPREPQVYTLPPSREEMTKNQVSLWCLVKGFYPSDIAVEWESNGQPENNYKTTPPVLDSDGSFFLYSKLTVDKSRWQQGNVFSCSVMHEALHNHYTQKSLSLSGECGGGGSGGGGSQVQLQQSGGGLVKPGESVKISCAASGYTFTNYGMNWVKQAPGKGLKWMGWINTYTGESTYADDFKGRFTFSLETSASAAYLQINSLRPEDTAVYFCARFAIKGDYWGQGTTVTVSSASTGGGGSGGGGSGGGGSGGGGSGDIVMTQSPSSLSASVGDKATITCRSTKSLLHSNGITYLYWYLQKPGKAPKLLIYQMSNLASGVPDRFSSSGSGTEFTLTISSVQPEDEGTYYCAQNLEIPRTFGQGTKLEIK

SEQ ID NO: 434 - protein, 976 aa, Artificial Sequence
  Description of Artificial Sequence: Synthetic polypeptide
EVQLVESGGGLVQPGGSLRLSCAASGYTFTSYWLHWVRQAPGKGLEWVGMIDPSNSDTRFNPNFKDRFTISADTSKNTAYLQMNSLRAEDTAVYYCATYRSYVTPLDYWGQGTLVTVSSASTKGPSVFPLAPSSKSTSGGTAALGCLVKDYFPEPVTVSWNSGALTSGVHTFPAVLQSSGLYSLSSVVTVPSSSLGTQTYICNVNHKPSNTKVDKKVEPKSCDKTHTCPSCPAPEFLGGPSVFLFPPKPKDTLMISRTPEVTCVVVDVSQEDPEVQFNWYVDGVEVHNAKTKPREEQFNSKYRVVSVLTVLHQDWLNGKEYKCKVSNKGLPSSIEKTISKAKGQPREPQVYTLPPSREEMTKNQVSLSCAVKGFYPSDIAVEWESNGQPENNYKTTPPVLDSDGSFFLVSKLTVDKSRWQQGNVFSCSVMHEALHNHYTQKSLSLSKSCDKTGGGGSGGGGSGGGGSGGGGSGGGGSGGGGSGGGGSGGGGSCPSCPAPEFLGGPSVFLFPPKPKDTLMISRTPEVTCVVVDVSQEDPEVQFNWYVDGVEVHNAKTKPREEQFNSDYRVVSVLTVLHQDWLNGKEYKCKVSNKGLPSSIEKTISKAKGQPREPQVYTLPPSREEMTKNQVSLWCLVKGFYPSDIAVEWESNGQPENNYKTTPPVLDSDGSFFLYSKLTVDKSRWQQGNVFSCSVMHEALHNHYTQKSLSLSGECGGGGSGGGGSQVQLQQSGGGLVKPGESVKISCAASGYTFTNYGMNWVKQAPGKGLKWMGWINTYTGESTYADDFKGRFTFSLETSASAAYLQINSLRPEDTAVYFCARFAIKGDYWGQGTTVTVSSASTGGGGSGGGGSGGGGSGGGGSGDIVMTQSPSSLSASVGDKATITCRSTKSLLHSDGITYLYWYLQKPGKAPKLLIYQLSNLASGVPDRFSSSGSGTEFTLTISSVQPEDEGTYYCAQNLEIPRTFGQGTKLEIK

SEQ ID NO: 435 - protein, 975 aa, Artificial Sequence
  Description of Artificial Sequence: Synthetic polypeptide
EVQLVESGGGLVQPGGSLRLSCAASGYTFTSYWLHWVRQAPGKGLEWVGMIDPSNSDTRFNPNFKDRFTISADTSKNTAYLQMNSLRAEDTAVYYCATYRSYVTPLDYWGQGTLVTVSSASTKGPSVFPLAPSSKSTSGGTAALGCLVKDYFPEPVTVSWNSGALTSGVHTFPAVLQSSGLYSLSSVVTVPSSSLGTQTYICNVNHKPSNTKVDKKVEPKSCDKTHTCPSCPAPEFLGGPSVFLFPPKPKDTLMISRTPEVTCVVVDVSQEDPEVQFNWYVDGVEVHNAKTKPREEQFNSKYRVVSVLTVLHQDWLNGKEYKCKVSNKGLPSSIEKTISKAKGQPREPQVYTLPPSREEMTKNQVSLSCAVKGFYPSDIAVEWESNGQPENNYKTTPPVLDSDGSFFLVSKLTVDKSRWQQGNVFSCSVMHEALHNHYTQKSLSLSKSCDKTGGGGSGGGGSGGGGSGGGGSGGGGSGGGGSGGGGSGGGGSCPSCPAPEFLGGPSVFLFPPKPKDTLMISRTPEVTCVVVDVSQEDPEVQFNWYVDGVEVHNAKTKPREEQFNSDYRVVSVLTVLHQDWLNGKEYKCKVSNKGLPSSIEKTISKAKGQPREPQVYTLPPSREEMTKNQVSLWCLVKGFYPSDIAVEWESNGQPENNYKTTPPVLDSDGSFFLYSKLTVDKSRWQQGNVFSCSVMHEALHNHYTQKSLSLSGECGGGGSGGGGSDIVMTQSPSSLSASVGDKATITCRSTKSLLHSNGITYLYWYLQKPGKAPKLLIYQMSNLASGVPDRFSSSGSGTEFTLTISSVQPEDEGTYYCAQNLEIPRTFGQGTKLEIKRTGGGGSGGGGSGGGGSGGGGSGQVQLQQSGGGLVKPGESVKISCAASGYTFTNYGMNWVKQAPGKGLKWMGWINTYTGESTYADDFKGRFTFSLETSASAAYLQINSLRPEDTAVYFCARFAIKGDYWGQGTTVTVSS

SEQ ID NO: 436 - protein, 975 aa, Artificial Sequence
  Description of Artificial Sequence: Synthetic polypeptide
EVQLVESGGGLVQPGGSLRLSCAASGYTFTSYWLHWVRQAPGKGLEWVGMIDPSNSDTRFNPNFKDRFTISADTSKNTAYLQMNSLRAEDTAVYYCATYRSYVTPLDYWGQGTLVTVSSASTKGPSVFPLAPSSKSTSGGTAALGCLVKDYFPEPVTVSWNSGALTSGVHTFPAVLQSSGLYSLSSVVTVPSSSLGTQTYICNVNHKPSNTKVDKKVEPKSCDKTHTCPSCPAPEFLGGPSVFLFPPKPKDTLMISRTPEVTCVVVDVSQEDPEVQFNWYVDGVEVHNAKTKPREEQFNSKYRVVSVLTVLHQDWLNGKEYKCKVSNKGLPSSIEKTISKAKGQPREPQVYTLPPSREEMTKNQVSLSCAVKGFYPSDIAVEWESNGQPENNYKTTPPVLDSDGSFFLVSKLTVDKSRWQQGNVFSCSVMHEALHNHYTQKSLSLSKSCDKTGGGGSGGGGSGGGGSGGGGSGGGGSGGGGSGGGGSGGGGSCPSCPAPEFLGGPSVFLFPPKPKDTLMISRTPEVTCVVVDVSQEDPEVQFNWYVDGVEVHNAKTKPREEQFNSDYRVVSVLTVLHQDWLNGKEYKCKVSNKGLPSSIEKTISKAKGQPREPQVYTLPPSREEMTKNQVSLWCLVKGFYPSDIAVEWESNGQPENNYKTTPPVLDSDGSFFLYSKLTVDKSRWQQGNVFSCSVMHEALHNHYTQKSLSLSGECGGGGSGGGGSDIVMTQSPSSLSASVGDKATITCRSTKSLLHSDGITYLYWYLQKPGKAPKLLIYQLSNLASGVPDRFSSSGSGTEFTLTISSVQPEDEGTYYCAQNLEIPRTFGQGTKLEIKRTGGGGSGGGGSGGGGSGGGGSGQVQLQQSGGGLVKPGESVKISCAASGYTFTNYGMNWVKQAPGKGLKWMGWINTYTGESTYADDFKGRFTFSLETSASAAYLQINSLRPEDTAVYFCARFAIKGDYWGQGTTVTVSS

SEQ ID NO: 437 - protein, 977 aa, Artificial Sequence
  Description of Artificial Sequence: Synthetic polypeptide
EVQLVESGGGLVQPGGSLRLSCAASGYTFTSYWLHWVRQAPGKGLEWVGMIDPSNSDTRFNPNFKDRFTISADTSKNTAYLQMNSLRAEDTAVYYCATYRSYVTPLDYWGQGTLVTVSSASTKGPSVFPLAPSSKSTSGGTAALGCLVKDYFPEPVTVSWNSGALTSGVHTFPAVLQSSGLYSLSSVVTVPSSSLGTQTYICNVNHKPSNTKVDKKVEPKSCDKTHTCPSCPAPEFLGGPSVFLFPPKPKDTLMISRTPEVTCVVVDVSQEDPEVQFNWYVDGVEVHNAKTKPREEQFNSKYRVVSVLTVLHQDWLNGKEYKCKVSNKGLPSSIEKTISKAKGQPREPQVYTLPPSREEMTKNQVSLSCAVKGFYPSDIAVEWESNGQPENNYKTTPPVLDSDGSFFLVSKLTVDKSRWQQGNVFSCSVMHEALHNHYTQKSLSLSKSCDKTGGGGSGGGGSGGGGSGGGGSGGGGSGGGGSGGGGSGGGGSCPSCPAPEFLGGPSVFLFPPKPKDTLMISRTPEVTCVVVDVSQEDPEVQFNWYVDGVEVHNAKTKPREEQFNSDYRVVSVLTVLHQDWLNGKEYKCKVSNKGLPSSIEKTISKAKGQPREPQVYTLPPSREEMTKNQVSLWCLVKGFYPSDIAVEWESNGQPENNYKTTPPVLDSDGSFFLYSKLTVDKSRWQQGNVFSCSVMHEALHNHYTQKSLSLSGECGGGGSGGGGSDIVMTQSPSSLSASVGDKATITCRSTKSLLHSNGITYLYWYLQKPGKAPKLLIYQMSNLASGVPDRFSSSGSGTEFTLTISSVQPEDEGTYYCAQNLEIPRTFGQGTKLEIKRTPSHNSHQVPSAGGPTANSGTSGSQVQLQQSGGGLVKPGESVKISCAASGYTFTNYGMNWVKQAPGKGLKWMGWINTYTGESTYADDFKGRFTFSLETSASAAYLQINSLRPEDTAVYFCARFAIKGDYWGQGTTVTVSS

SEQ ID NO: 438 - protein, 116 aa, Artificial Sequence
  Description of Artificial Sequence: Synthetic polypeptide
QVQLVQSGAEVKKPGASVKVSCKASGYTFTNYGMNWVRQAPGQGLKWMGWINTYTGESTYADDFKGRVTITADTSASTAYMELSSLRSEDTAVYYCARFAIKGDYWGQGTLVTVSS

SEQ ID NO: 439 - DNA, 348 bp, Artificial Sequence
  Description of Artificial Sequence: Synthetic polynucleotide
caagtgcagttggtccagagcggtgcggaggtaaagaaacccggtgcatccgtgaaggtgtcgtgcaaagcctccgggtatacgttcacgaactatgggatgaactgggtcagacaagcaccgggtcagggactcaaatggatggggtggatcaatacatacacaggggaatcgacctacgcggatgactttaagggaagggtcaccattacggcggacacctcggcatcgactgcgtatatggaactctcatcacttcgctcggaggacacagccgtctactattgtgcgcggtttgcgatcaagggagattactggggacagggaactttggtaacagtatcaagc

SEQ ID NO: 440 - protein, 116 aa, Artificial Sequence
  Description of Artificial Sequence: Synthetic polypeptide
QVQLVQSGAEVKKPGASVKVSCKASGYTFTNYGMNWVRQAPGQGLKWMGWINTYTGESTYADDFKGRVTITLDTSASTAYMELSSLRSEDTAVYFCARFAIKGDYWGQGTLVTVSS

SEQ ID NO: 441 - DNA, 348 bp, Artificial Sequence
  Description of Artificial Sequence: Synthetic polynucleotide
caagtgcagttggtccagagcggtgcggaggtaaagaaacccggtgcatccgtgaaggtgtcgtgcaaagcctccgggtatacgttcacgaactatgggatgaactgggtcagacaagcaccgggtcagggactcaaatggatggggtggatcaatacatacacaggggaatcgacctacgcggatgactttaagggaagggtcaccattacgttggacacctcggcatcgactgcgtatatggaactctcatcacttcgctcggaggacacagccgtctacttctgtgcgcggtttgcgatcaagggagattactggggacagggaactttggtaacagtatcaagc

SEQ ID NO: 442 - protein, 116 aa, Artificial Sequence
  Description of Artificial Sequence: Synthetic polypeptide
QVQLQQSGGGLVKPGGSVKISCKASGYTFTNYGMNWVKQAPGKGLKWMGWINTYTGESTYADDFKGRFAFSLETSASAAYLQINSLRPEDTAVYFCARFAIKGDYWGQGTLVTVSS

SEQ ID NO: 443 - DNA, 354 bp, Artificial Sequence
  Description of Artificial Sequence: Synthetic polynucleotide
caggtacagctgcagcaaagcgggggaggactcgtgaagcctggtggttcggtcaaaatctcgtgtaaagcgtcagggtacaccttcacaaactatggtatgaactgggtgaaacaggcacccggaaagggtcttaagtggatgggctggatcaatacctacacgggggagtcgacatatgcggacgactttaaaggacggttcgcgttttcgttggagactagcgcctccgctgcctacctccaaatcaatagccttaggccggaagatacggcggtctacttttgcgcaagatttgccattaagggggattattggggccaggggacgctggtgacagtcagctccgctagc

SEQ ID NO: 444 - protein, 116 aa, Artificial Sequence
  Description of Artificial Sequence: Synthetic polypeptide
QVQLVQSGAEVKKPGASVKVSCKASGYTFTNYGMNWVRQAPGQGLKWMGWINTYTGESTYADDFKGRFAFSLDTSASTAYMELSSLRSEDTAVYFCARFAIKGDYWGQGTLVTVSS

SEQ ID NO: 445 - DNA, 348 bp, Artificial Sequence
  Description of Artificial Sequence: Synthetic polynucleotide
caggtccagcttgtgcagtccggagccgaagtcaagaagccgggagccagcgtaaaggtgtcatgtaaggcgtcggggtatacattcacgaactacggtatgaattgggtgcgccaagctcccggacagggtttgaaatggatggggtggatcaacacgtatacaggggaatcaacttacgccgacgacttcaagggaaggttcgcattttcgttggatacatcggcgtccacggcgtacatggagctgtcaagcctgcggtcggaggacacggcggtatacttctgcgcaagatttgctatcaaaggtgattattgggggcagggaaccctggtaaccgtgagcagc

SEQ ID NO: 446 - protein, 116 aa, Artificial Sequence
  Description of Artificial Sequence: Synthetic polypeptide
QVQLVQSGSELKKPGASVKVSCKASGYTFTNYGMNWVRQAPGQGLKWMGWINTYTGESTYADDFKGRFAFSLDTSASTAYLQISSLKAEDTAVYFCARFAIKGDYWGQGTLVTVSS

SEQ ID NO: 447 - DNA, 348 bp, Artificial Sequence
  Description of Artificial Sequence: Synthetic polynucleotide
caggtccagctggtgcagtcaggttcagagctgaagaagcccggagcgtccgtcaaagtgtcatgcaaggcctcgggttacacgtttacgaactacggtatgaattgggtccgccaggctccgggccagggactgaaatggatgggatggatcaacacatatactggtgaatccacgtatgcggacgactttaaggggagattcgcgttcagccttgatacatcggcgtcgaccgcgtacctccaaatctcgtccttgaaagcagaggacactgcagtatacttttgtgcccggttcgctatcaagggagattattggggccaagggaccttggtgacagtgtccagc

SEQ ID NO: 448 - protein, 116 aa, Artificial Sequence
  Description of Artificial Sequence: Synthetic polypeptide
QVQLVQSGAEVKKPGASVKISCKASGYTFTNYGMNWVRQAPGQGLKWMGWINTYTGESTYADDFKGRFTITLDTSASTAYMELSSLRSEDTAVYYCARFAIKGDYWGQGTLVTVSS

SEQ ID NO: 449 - DNA, 348 bp, Artificial Sequence
  Description of Artificial Sequence: Synthetic polynucleotide
caagtccagttggtacaatcgggtgccgaggtaaagaaaccgggagcgtcggtcaaaatcagctgcaaggcctcaggctatacctttacaaactacggcatgaattgggtgagacaggcacccgggcagggattgaaatggatgggttggatcaacacgtatacaggggagtccacctatgcagatgactttaaggggcgcttcactatcacgctcgacacgtccgcgtcgacggcgtacatggaactgtcatcgcttcggagcgaagatacagccgtgtactattgtgctaggtttgcgattaagggagactactggggacagggaaccctcgtaactgtgtcatca

SEQ ID NO: 450 - protein, 116 aa, Artificial Sequence
  Description of Artificial Sequence: Synthetic polypeptide
QVQLVQSGAEVKKPGASVKISCKASGYTFTNYGMNWVRQAPGQGLKWMGWINTYTGESTYADDFKGRFAFSLDTSASTAYLQLSSLRSEDTAVYFCARFAIKGDYWGQGTLVTVSS

SEQ ID NO: 451 - DNA, 348 bp, Artificial Sequence
  Description of Artificial Sequence: Synthetic polynucleotide
caagtgcagctggtacaatcaggtgcggaggtgaaaaagccgggtgcctccgtcaagatttcatgcaaggcctcgggatacacattcaccaactatgggatgaattgggtgaggcaggctcccggtcaggggttgaaatggatggggtggattaacacatatacgggagaaagcacgtatgcggacgacttcaaggggcgcttcgcgttttccctggatacttcggcatcgactgcgtacctccagttgtcgtcgcttagatccgaggacacggccgtctacttctgtgcacggtttgcaatcaagggggattactggggacagggaacgcttgtaaccgtaagctca

SEQ ID NO: 452 - protein, 112 aa, Artificial Sequence
  Description of Artificial Sequence: Synthetic polypeptide
DIVMTQSPLSLPVTPGEPASISCRSTKSLLHSNGITYLYWYLQKPGQSPQLLIYQMSNLASGVPDRFSGSGSGTDFTLKISRVEAEDVGVYYCAQNLEIPRTFGQGTKVEIK

SEQ ID NO: 453 - DNA, 663 bp, Artificial Sequence
  Description of Artificial Sequence: Synthetic polynucleotide
gacattgtcatgacgcagtcgccgctctcgctcccggtcacaccgggagaacccgcgtccatttcatgcagatcgacaaagtcactcctccattcaaatggaatcacttacttgtactggtatcttcaaaaacccggtcagtcaccacagttgctcatctaccaaatgtccaatttggcttcgggagtgcccgaccgattcagcggttcggggagcggtacggattttacgttgaagatcagcagggtagaggcggaggacgtgggggtgtactattgtgcacagaaccttgaaattccacgcacctttggacaaggcaccaaggtcgaaatcaagcgtacggtggcggcaccttcagtgttcatctttcccccttccgatgaacagctcaaaagcgggactgcatccgtagtctgtcttttgaacaacttctatcccagagaggcgaaagtacagtggaaggtggacaacgcccttcaatcaggcaatagccaggagtcggtgacggagcaggattccaaagatagcacatactcgctttcatccactttgacattgtcgaaagcggactacgaaaagcacaaggtctatgcgtgcgaggtgacgcaccagggactttcgtcgccggtaaccaagtcgttcaatcgcggggagtgctgataa

SEQ ID NO: 454 - protein, 112 aa, Artificial Sequence
  Description of Artificial Sequence: Synthetic polypeptide
DIVMTQSPSSLSASVGDKATITCRSTKSLLHSNGITYLYWYLQKPGKAPKLLIYQMSNLASGVPDRFSSSGSGTDFTLRISSVQPEDFATYYCAQNLEIPRTFGGGTKLEIK

SEQ ID NO: 455 - DNA, 336 bp, Artificial Sequence
  Description of Artificial Sequence: Synthetic polynucleotide
gacattgtcatgacccagtcgccgtcatccctttcagcgagcgtgggggataaggcaacgatcacgtgtcgaagcaccaaatccttgctgcacagcaacgggattacgtatttgtactggtatttgcaaaaacccgggaaagccccgaagctcctcatctaccagatgtcgaatctggcgtcgggggtgccagatcggttctccagcagcgggtcgggtacagacttcacactccggatctcatcagtgcagcccgaggactttgcgacctactattgtgcccaaaatcttgaaatcccgagaacgttcggaggtggcacgaaattggagattaaa

SEQ ID NO: 456 - protein, 112 aa, Artificial Sequence
  Description of Artificial Sequence: Synthetic polypeptide
DIVMTQSPLSLPVTPGEPASISCRSTKSLLHSNGITYLYWYLQKPGQSPQLLIYQMSNLASGVPDRFSSSGSGTDFTLKISRVEAEDVGVYYCAQNLEIPRTFGQGTKVEIK

SEQ ID NO: 457 - DNA, 336 bp, Artificial Sequence
  Description of Artificial Sequence: Synthetic polynucleotide
gatatcgtaatgacccaatcgccgttgtcgcttccagtcacacccggggagcctgcttcgattagctgcagatcaacgaagtcgctcctccattcaaacgggattacgtatttgtactggtatcttcaaaagccgggtcagagcccgcagctgctgatctaccagatgtccaacttggcctcgggcgtccccgaccggtttagcagcagcgggtcgggaacggacttcactctcaagatctcaagggtcgaagcggaagatgtgggtgtgtattactgtgcgcagaatcttgagattccccgaacattcggtcagggaaccaaagtcgagatcaag

SEQ ID NO: 458 - protein, 112 aa, Artificial Sequence
  Description of Artificial Sequence: Synthetic polypeptide
DIVMTQSPLSLPVTPGEPASISCRSTKSLLHSNGITYLYWYLQKPGQSPQLLIYQMSNLASGVPDRFSSSGSGTDFTLKISRVEAEDVGVYYCAQNLEIPRTFGGGTKLEIK

SEQ ID NO: 459 - DNA, 336 bp, Artificial Sequence
  Description of Artificial Sequence: Synthetic polynucleotide
gacatcgtgatgacgcagtccccactgtcgctccctgtaacaccaggggagcccgcttccatttcgtgtaggtcaacgaagtccttgcttcatagcaatgggatcacttacttgtactggtatctccaaaaaccgggtcagtcccctcagttgctgatctaccagatgtcgaaccttgcgagcggtgtcccggatcgattttcatcgtccggatcgggaaccgacttcacactgaagattagccgcgtggaggccgaagatgtcggggtctactactgtgctcaaaaccttgagattccccggacgtttggaggcggcacgaagctggaaatcaag

SEQ ID NO: 460 - protein, 251 aa, Artificial Sequence
  Description of Artificial Sequence: Synthetic polypeptide
QVQLVQSGSELKKPGESVKVSCKASGYTFTNYGMNWVRQAPGQCLKWMGWINTYTGESTYADDFKGRFAFSLDTSASTAYLQISSLKAEDTAVYFCARFAIKGDYWGQGTLVTVSSASTGGGGSGGGGSGGGGSGGGGSDIVMTQSPLSLPVTPGEPASISCRSTKSLLHSDGITYLYWYLQKPGQSPQLLIYQLSNLASGVPDRFSSSGSGTDFTLKISRVEAEDEGVYYCAQNLEIPRTFGCGTKVEIK

SEQ ID NO: 461 - DNA, 759 bp, Artificial Sequence
  Description of Artificial Sequence: Synthetic polynucleotide
caggtacaactcgtgcagtcggggtcggagcttaagaagccgggagagtcggtaaaagtgtcgtgtaaagcctccgggtatacctttacgaattacggcatgaactgggtccggcaggcacccggtcagtgtctcaagtggatgggctggatcaatacgtacacgggcgaatccacttatgcagatgactttaagggaagattcgcgttctcattggacacatcagcgtcaacggcgtatcttcaaatttcgtccttgaaagcggaggacacggcggtctatttctgcgcacgattcgctatcaaaggagattactggggtcaggggacacttgtgacagtgtcgagcgccagcaccggaggtggagggagcggaggaggaggtagcggtggcggtggctcgggtggaggtggatcggacatcgtcatgactcagagccctctgtcactgcccgtaactcccggggagcccgcctccattagctgtcggtcgacaaagtccttgctccactcagatggaatcacgtatttgtactggtacttgcaaaagcctggacagtcgccacagctccttatctaccagttgtccaacctggcgtcgggagtaccggaccgcttttcatcatccgggtcaggcaccgatttcacactgaagattagccgcgtggaggcggaggacgaaggggtctactactgcgcccagaacctcgaaattccgaggacctttggatgcggtactaaagtggaaatcaagtgataa

SEQ ID NO: 462 - protein, 251 aa, Artificial Sequence
  Description of Artificial Sequence: Synthetic polypeptide
QVQLVQSGSELKKPGESVKVSCKASGYTFTNYGMHWVRQAPGQGLKWMGWINTYTGESTYADDFKGRFAFSLDTSASTAYLQISSLKAEDTAVYFCARFAIKGDYWGQGTLVTVSSASTGGGGSGGGGSGGGGSGGGGSDIVMTQSPLSLPVTPGEPASISCRSTKSLLHSDGITYLYWYLQKPGQSPQLLIYQLSNLASGVPDRFSSSGSGTDFTLKISRVEAEDEGVYYCAQNLEIPYTFGQGTKVEIK

SEQ ID NO: 463 - DNA, 759 bp, Artificial Sequence
  Description of Artificial Sequence: Synthetic polynucleotide
caggtacaactcgtgcagtcggggtcggagcttaagaagccgggagagtcggtaaaagtgtcgtgtaaagcctccgggtatacctttacgaattacggcatgcattgggtccggcaggcacccggtcaggggctcaagtggatgggctggatcaatacgtacacgggcgaatccacttatgcagatgactttaagggaagattcgcgttctcattggacacatcagcgtcaacggcgtatcttcaaatttcgtccttgaaagcggaggacacggcggtctatttctgcgcacgattcgctatcaaaggagattactggggtcaggggacacttgtgacagtgtcgagcgccagcaccggaggtggagggagcggaggaggaggtagcggtggcggtggctcgggtggaggtggatcggacatcgtcatgactcagagccctctgtcactgcccgtaactcccggggagcccgcctccattagctgtcggtcgacaaagtccttgctccactcagatggaatcacgtatttgtactggtacttgcaaaagcctggacagtcgccacagctccttatctaccagttgtccaacctggcgtcgggagtaccggaccgcttttcatcatccgggtcaggcaccgatttcacactgaagattagccgcgtggaggcggaggacgaaggggtctactactgcgcccagaacctcgaaattccgtacacctttggacaaggtactaaagtggaaatcaagtgataa

SEQ ID NO: 464 - protein, 251 aa, Artificial Sequence
  Description of Artificial Sequence: Synthetic polypeptide
QVQLVQSGSELKKPGESVKVSCKASGYTFTNYGMNWVRQAPGQGLKWMGWINTYTGESTYADDFKGRFAFSLDTSASTAYLQISSLKAEDTAVYFCARFAIKGDYWGQGTLVTVSSASTGGGGSGGGGSGGGGSGGGGSDIVMTQSPLSLPVTPGEPASISCRSTKSLLHSDGITYLYWYLQKPGQSPQLLIYQLSNLASGVPDRFSSSGSGTDFTLKISRVEAEDEGVYYCAQNLEIPRTFGQGTKVEIK

SEQ ID NO: 465 - DNA, 759 bp, Artificial Sequence
  Description of Artificial Sequence: Synthetic polynucleotide
caggtacaactcgtgcagtcggggtcggagcttaagaagccgggagagtcggtaaaagtgtcgtgtaaagcctccgggtatacctttacgaattacggcatgaactgggtccggcaggcacccggtcaggggctcaagtggatgggctggatcaatacgtacacgggcgaatccacttatgcagatgactttaagggaagattcgcgttctcattggacacatcagcgtcaacggcgtatcttcaaatttcgtccttgaaagcggaggacacggcggtctatttctgcgcacgattcgctatcaaaggagattactggggtcaggggacacttgtgacagtgtcgagcgccagcaccggaggtggagggagcggaggaggaggtagcggtggcggtggctcgggtggaggtggatcggacatcgtcatgactcagagccctctgtcactgcccgtaactcccggggagcccgcctccattagctgtcggtcgacaaagtccttgctccactcagatggaatcacgtatttgtactggtacttgcaaaagcctggacagtcgccacagctccttatctaccagttgtccaacctggcgtcgggagtaccggaccgcttttcatcatccgggtcaggcaccgatttcacactgaagattagccgcgtggaggcggaggacgaaggggtctactactgcgcccagaacctcgaaattccgaggacctttggacaaggtactaaagtggaaatcaagtgataa

SEQ ID NO: 466 - protein, 251 aa, Artificial Sequence
  Description of Artificial Sequence: Synthetic polypeptide
DIVMTQSPLSLPVTPGEPASISCRSTKSLLHSDGITYLYWYLQKPGQSPQLLIYQLSNLASGVPDRFSSSGSGTDFTLKISRVEAEDEGVYYCAQNLEIPRTFGQGTKVEIKRTGGGGSGGGGSGGGGSGGGGSGQVQLVQSGSELKKPGESVKVSCKASGYTFTNYGMNWVRQAPGQGLKWMGWINTYTGESTYADDFKGRFAFSLDTSASTAYLQISSLKAEDTAVYFCARFAIKGDYWGQGTLVTVSS

SEQ ID NO: 467 - DNA, 759 bp, Artificial Sequence
  Description of Artificial Sequence: Synthetic polynucleotide
gatatcgtgatgacacagtcacccctgtcgctccctgtgactcccggagagcctgcgtccatctcgtgccggtcaacaaagtccctgctgcacagcgacggaattacgtatttgtactggtatttgcaaaaacccggacagagcccgcaattgttgatctaccagctctcaaaccttgcgagcggggtcccggatcgctttagctcgtcggggtcaggaactgacttcacactcaaaatctcaagggtcgaggccgaggatgaaggtgtctattactgcgctcagaatctcgaaatcccgcggacctttggtcagggtacgaaggtagagatcaagcgaacgggaggcggtgggtccggtggcggtggttccggcggaggtggttcgggaggaggaggtagcggtcaggtgcagcttgtccagtcgggatcggagctcaagaagccaggagagtcggtgaaagtatcgtgtaaagcctcggggtacacattcacgaactacggcatgaattgggtgagacaagctcccgggcagggcttgaaatggatgggatggattaacacctacacaggggaatccacatatgcggacgacttcaaggggaggttcgcgttttcacttgatacttcagcgagcacggcgtatctccaaatttcgtcgcttaaggcagaagataccgcagtatacttttgcgccagattcgcgattaaaggggactattggggacaggggacccttgtcacggtgtcatcatgataa

SEQ ID NO: 468 - protein, 250 aa, Artificial Sequence
  Description of Artificial Sequence: Synthetic polypeptide
DIVMTQSPLSLPVTPGEPASISCRSTKSLLHSNGITYLYWYLQKPGQSPQLLIYQMSNLASGVPDRFSSSGSGTDFTLKISRVEAEDEGVYYCAQNLEIPRTFGGGTKLEIKRTGGGGSGGGGSGGGGSGGGGSQVQLVQSGAEVKKPGESVKISCKASGYTFTNYGMNWVRQAPGQGLKWMGWINTYTGESTYADDFKGRFAFSLDTSASTAYLQLSSLRSEDTAVYFCARFAIKGDYWGQGTLVTVSS

SEQ ID NO: 469 - DNA, 756 bp, Artificial Sequence
  Description of Artificial Sequence: Synthetic polynucleotide
gatatcgtgatgacacagtcacccctgtcgctccctgtgactcccggagagcctgcgtccatctcgtgccggtcaacaaagtccctgctgcacagcaatggaattacgtatttgtactggtatttgcaaaaacccggacagagcccgcaattgttgatctaccagatgtcaaaccttgcgagcggggtcccggatcgctttagctcgtcggggtcaggaactgacttcacactcaaaatctcaagggtcgaggccgaggatgaaggtgtctattactgcgctcagaatctcgaaatcccgcggacctttggtggaggtacgaagctggagatcaagcgaacgggaggcggtgggtccggtggcggtggttccggcggaggtggttcgggaggaggaggtagccaggtgcagcttgtccagtcgggagcagaggtaaagaagccaggagagtcggtgaaaatctcgtgtaaagcctcggggtacacattcacgaactacggcatgaattgggtgagacaagctcccgggcagggcttgaaatggatgggatggattaacacctacacaggggaatccacatatgcggacgacttcaaggggaggttcgcgttttcacttgatacttcagcgagcacggcgtatctccaactctcgtcgcttcgctccgaagataccgcagtatacttttgcgccagattcgcgattaaaggggactattggggacaggggacccttgtcacggtgtcatcatgataa

SEQ ID NO: 470 - protein, 250 aa, Artificial Sequence
  Description of Artificial Sequence: Synthetic polypeptide
DIVMTQSPLSLPVTPGEPASISCRSTKSLLHSDGITYLYWYLQKPGQSPQLLIYQLSNLASGVPDRFSSSGSGTDFTLKISRVEAEDEGVYYCAQNLEIPRTFGGGTKLEIKRTGGGGSGGGGSGGGGSGGGGSQVQLVQSGAEVKKPGESVKISCKASGYTFTNYGMNWVRQAPGQGLKWMGWINTYTGESTYADDFKGRFAFSLDTSASTAYLQLSSLRSEDTAVYFCARFAIKGDYWGQGTLVTVSS

SEQ ID NO: 471 - DNA, 756 bp, Artificial Sequence
  Description of Artificial Sequence: Synthetic polynucleotide
gatatcgtgatgacacagtcacccctgtcgctccctgtgactcccggagagcctgcgtccatctcgtgccggtcaacaaagtccctgctgcacagcgacggaattacgtatttgtactggtatttgcaaaaacccggacagagcccgcaattgttgatctaccagctctcaaaccttgcgagcggggtcccggatcgctttagctcgtcggggtcaggaactgacttcacactcaaaatctcaagggtcgaggccgaggatgaaggtgtctattactgcgctcagaatctcgaaatcccgcggacctttggtggaggtacgaagctggagatcaagcgaacgggaggcggtgggtccggtggcggtggttccggcggaggtggttcgggaggaggaggtagccaggtgcagcttgtccagtcgggagcagaggtaaagaagccaggagagtcggtgaaaatctcgtgtaaagcctcggggtacacattcacgaactacggcatgaattgggtgagacaagctcccgggcagggcttgaaatggatgggatggattaacacctacacaggggaatccacatatgcggacgacttcaaggggaggttcgcgttttcacttgatacttcagcgagcacggcgtatctccaactgtcgtcgcttcgctccgaagataccgcagtatacttttgcgccagattcgcgattaaaggggactattggggacaggggacccttgtcacggtgtcatcatgataa

SEQ ID NO: 472 - protein, 250 aa, Artificial Sequence
  Description of Artificial Sequence: Synthetic polypeptide
DIVMTQSPLSLPVTPGEPASISCRSTKSLLHSDGITYLYWYLQKPGQSPQLLIYQLSNLASGVPDRFSSSGSGTDFTLKISRVEAEDEGVYYCAQNLEIPRTFGCGTKLEIKRTGGGGSGGGGSGGGGSGGGGSQVQLVQSGAEVKKPGESVKISCKASGYTFTNYGMNWVRQAPGQCLKWMGWINTYTGESTYADDFKGRFAFSLDTSASTAYLQLSSLRSEDTAVYFCARFAIKGDYWGQGTLVTVSS

SEQ ID NO: 473 - DNA, 756 bp, Artificial Sequence
  Description of Artificial Sequence: Synthetic polynucleotide
gatatcgtgatgacacagtcacccctgtcgctccctgtgactcccggagagcctgcgtccatctcgtgccggtcaacaaagtccctgctgcacagcgacggaattacgtatttgtactggtatttgcaaaaacccggacagagcccgcaattgttgatctaccagctctcaaaccttgcgagcggggtcccggatcgctttagctcgtcggggtcaggaactgacttcacactcaaaatctcaagggtcgaggccgaggatgaaggtgtctattactgcgctcagaatctcgaaatcccgcggacctttggttgcggtacgaagctggagatcaagcgaacgggaggcggtgggtccggtggcggtggttccggcggaggtggttcgggaggaggaggtagccaggtgcagcttgtccagtcgggagcagaggtaaagaagccaggagagtcggtgaaaatctcgtgtaaagcctcggggtacacattcacgaactacggcatgaattgggtgagacaagctcccgggcagtgtttgaaatggatgggatggattaacacctacacaggggaatccacatatgcggacgacttcaaggggaggttcgcgttttcacttgatacttcagcgagcacggcgtatctccaactgtcgtcgcttcgctccgaagataccgcagtatacttttgcgccagattcgcgattaaaggggactattggggacaggggacccttgtcacggtgtcatcatgataa

SEQ ID NO: 474 - protein, 253 aa, Artificial Sequence
  Description of Artificial Sequence: Synthetic polypeptide
QVQLVQSGAEVKKPGESVKISCKASGYTFTNYGMNWVRQAPGQGLKWMGWINTYTGESTYADDFKGRFAFSLDTSASTAYLQLSSLRSEDTAVYFCARFAIKGDYWGQGTLVTVSSASTGGGGSGGGGSGGGGSGGGGSDIVMTQSPLSLPVTPGEPASISCRSTKSLLHSDGITYLYWYLQKPGQSPQLLIYQMSNLASGVPDRFSSSGSGTDFTLKISRVEAEDEGVYYCAQNLEIPRTFGGGTKLEIKRT

SEQ ID NO: 475 - DNA, 765 bp, Artificial Sequence
  Description of Artificial Sequence: Synthetic polynucleotide
caggtgcagctcgtccagtcaggggcggaggtcaagaaaccaggagagtcagtaaagatctcgtgcaaagcgtcgggatatacctttacaaactacggcatgaattgggtgcgacaagcacccggccagggcctgaagtggatggggtggatcaatacatatactggggagtccacttatgccgacgacttcaagggaaggtttgccttctccctggatacgtcggcgtcgaccgcttatttgcagttgagctcgctgaggtcggaagatacagcagtgtacttctgcgctcgcttcgcaatcaaaggggattactggggtcaggggacgcttgtaaccgtgtcctcagcgtcgacgggtggtggtgggtcgggaggtggtggtagcggaggtggagggtcgggtggaggcggatcagatattgtgatgacacaatcgccgctctcactgcccgtaacgcccggagagcccgcgtcaatttcatgtcggtcgacaaagtcactccttcactcggacgggattacgtacctctattggtatcttcaaaagccgggtcagtcacctcaactcctcatctaccagatgtcgaacttggcatcaggggtccctgatcgcttctcgtccagcgggtccgggacggactttaccttgaaaatctcaagagtggaggccgaggacgaaggggtctactactgtgcccagaaccttgaaattccgcggacgtttggaggagggacaaagctggagatcaaaagaacttgataa

SEQ ID NO: 476 - protein, 252 aa, Artificial Sequence
  Description of Artificial Sequence: Synthetic polypeptide
QVQLQQSGGGLVKPGESVKISCAASGYTFTNYGMNWVKQAPGKGLKWMGWINTYTGESTYADDFKGRFTFSLETSASAAYLQINSLRPEDTAVYFCARFAIKGDYWGQGTTVTVSSASTGGGGSGGGGSGGGGSGGGGSGDIVMTQSPSSLSASVGDKATITCRSTKSLLHSNGITYLYWYLQKPGKAPKLLIYQMSNLASGVPDRFSSSGSGTEFTLTISSVQPEDEGTYYCAQNLEIPRTFGQGTKLEIK

SEQ ID NO: 477 - DNA, 762 bp, Artificial Sequence
  Description of Artificial Sequence: Synthetic polynucleotide
caggtacaactccagcaatcaggaggcgggcttgtaaaacccggggagtcggtgaagatcagctgtgcagcatcagggtacacattcacaaactatggcatgaactgggtcaaacaggcgccagggaaggggctgaaatggatgggctggatcaatacgtacactggtgagagcacatacgcggatgatttcaaagggcggtttacgttttcactcgaaacgtcggcgtccgccgcatatcttcaaatcaattccttgaggccggaggacacagcagtctacttctgcgcccgatttgccattaagggtgattattggggccagggaaccacggtgactgtcagctccgcttcgacaggaggaggagggagcggtggaggaggatcgggaggtggagggtcgggtggtggtgggtcaggagacattgtgatgacccagtcgccctcgtcgctttcagcgagcgtcggggacaaggcgaccattacttgtcgctcaactaagtcgttgctgcactccaacgggatcacgtacctctattggtatctccaaaaacctggtaaagcgcctaagctcctgatctaccagatgtccaatttggcgtcgggagtaccggacagattttcaagctccggatcagggactgagttcacacttacgattagctccgtgcagcccgaggatgaagggacctattactgcgcccagaacttggaaatcccgagaaccttcggacagggtacgaagctggaaatcaagtgataa

SEQ ID NO: 478 - protein, 252 aa, Artificial Sequence
  Description of Artificial Sequence: Synthetic polypeptide
QVQLQQSGGGLVKPGESVKISCAASGYTFTNYGMNWVKQAPGKGLKWMGWINTYTGESTYADDFKGRFTFSLETSASAAYLQINSLRPEDTAVYFCARFAIKGDYWGQGTTVTVSSASTGGGGSGGGGSGGGGSGGGGSGDIVMTQSPSSLSASVGDKATITCRSTKSLLHSDGITYLYWYLQKPGKAPKLLIYQLSNLASGVPDRFSSSGSGTEFTLTISSVQPEDEGTYYCAQNLEIPRTFGQGTKLEIK

SEQ ID NO: 479 - DNA, 762 bp, Artificial Sequence
  Description of Artificial Sequence: Synthetic polynucleotide
caggtccagttgcaacagtccggaggtgggcttgtgaaacccggggagtcggtgaagatctcatgcgcggcttcggggtacacgttcacaaactacgggatgaattgggtcaagcaggcacccgggaaggggttgaaatggatgggttggatcaatacatacactggggagagcacgtatgcagatgacttcaaaggacgctttaccttcagcctcgaaacgagcgcctcagccgcatacctccaaatcaatagcctccggccagaagatactgcggtgtatttctgcgctaggttcgccattaaaggggactattggggacaggggacgacggtgacggtatcatcagcgtcgactggtggaggcggctccggaggaggtgggtccggcggtggcgggtcaggtggtggtggctcgggagatattgtaatgacacagtccccgtcctccctctccgcgagcgtgggagataaggccacgattacatgtcgaagcaccaaatcgctccttcactcggacggaatcacatatttgtattggtacttgcaaaaaccggggaaggcgcctaagctgctgatctaccagctttcgaacctggcgtcaggggtccctgaccggttttcgtcgtcgggaagcgggaccgagtttacacttacgatctcgtcagtacagcccgaggacgaaggaacatactattgcgcccagaacttggagattccgagaacttttggccagggaaccaagctcgaaatcaagtgataa

SEQ ID NO: 480 - protein, 251 aa, Artificial Sequence
  Description of Artificial Sequence: Synthetic polypeptide
DIVMTQSPSSLSASVGDKATITCRSTKSLLHSNGITYLYWYLQKPGKAPKLLIYQMSNLASGVPDRFSSSGSGTEFTLTISSVQPEDEGTYYCAQNLEIPRTFGQGTKLEIKRTGGGGSGGGGSGGGGSGGGGSGQVQLQQSGGGLVKPGESVKISCAASGYTFTNYGMNWVKQAPGKGLKWMGWINTYTGESTYADDFKGRFTFSLETSASAAYLQINSLRPEDTAVYFCARFAIKGDYWGQGTTVTVSS

SEQ ID NO: 481 - DNA, 759 bp, Artificial Sequence
  Description of Artificial Sequence: Synthetic polynucleotide
gacatcgtcatgacccagtcaccgtcctcactgtcggcgtcggtgggtgataaggccacaattacatgccgcagcacgaaatcactgctccactccaatgggattacatatctctattggtatctccaaaaacccggaaaggcacctaagttgctgatctaccagatgtcgaacttggcatcgggagtacccgataggttctcgtcgtcgggaagcggcacggagttcacgctcaccatttcctcagtccagccggaggacgaaggaacttactactgcgctcagaatcttgaaatcccgcgcacatttggacaagggacgaaacttgaaatcaagcgaactggaggaggtgggtcaggcggaggtgggagcggcggaggcggatcgggtggtggagggtcgggacaggtacagttgcagcagtcgggaggcgggctggtaaaacctggtgaaagcgtcaagatctcatgtgcagcctcagggtatacgttcaccaattacgggatgaactgggtgaagcaggcgccagggaaaggtcttaagtggatgggatggatcaacacttacacgggagagtccacatacgcggatgactttaaggggcggttcacgttttcgttggagacttcagcgtccgctgcctacctccaaatcaactcccttagacccgaggacacagcggtctatttctgtgcgcggtttgccattaaaggtgattattggggacagggtacgactgtgaccgtgtccagctgataa

SEQ ID NO: 482 - protein, 251 aa, Artificial Sequence
  Description of Artificial Sequence: Synthetic polypeptide
DIVMTQSPSSLSASVGDKATITCRSTKSLLHSDGITYLYWYLQKPGKAPKLLIYQLSNLASGVPDRFSSSGSGTEFTLTISSVQPEDEGTYYCAQNLEIPRTFGQGTKLEIKRTGGGGSGGGGSGGGGSGGGGSGQVQLQQSGGGLVKPGESVKISCAASGYTFTNYGMNWVKQAPGKGLKWMGWINTYTGESTYADDFKGRFTFSLETSASAAYLQINSLRPEDTAVYFCARFAIKGDYWGQGTTVTVSS

SEQ ID NO: 483 - DNA, 759 bp, Artificial Sequence
  Description of Artificial Sequence: Synthetic polynucleotide
gacatcgtcatgacccagtcaccgtcctcactgtcggcgtcggtgggtgataaggccacaattacatgccgcagcacgaaatcactgctccactccgacgggattacatatctctattggtatctccaaaaacccggaaaggcacctaagttgctgatctaccagttgtcgaacttggcatcgggagtacccgataggttctcgtcgtcgggaagcggcacggagttcacgctcaccatttcctcagtccagccggaggacgaaggaacttactactgcgctcagaatcttgaaatcccgcgcacatttggacaagggacgaaacttgaaatcaagcgaactggaggaggtgggtcaggcggaggtgggagcggcggaggcggatcgggtggtggagggtcgggacaggtacagttgcagcagtcgggaggcgggctggtaaaacctggtgaaagcgtcaagatctcatgtgcagcctcagggtatacgttcaccaattacgggatgaactgggtgaagcaggcgccagggaaaggtcttaagtggatgggatggatcaacacttacacgggagagtccacatacgcggatgactttaaggggcggttcacgttttcgttggagacttcagcgtccgctgcctacctccaaatcaactcccttagacccgaggacacagcggtctatttctgtgcgcggtttgccattaaaggtgattattggggacagggtacgactgtgaccgtgtccagctgataa

SEQ ID NO: 484 - protein, 253 aa, Artificial Sequence
  Description of Artificial Sequence: Synthetic polypeptide
DIVMTQSPSSLSASVGDKATITCRSTKSLLHSNGITYLYWYLQKPGKAPKLLIYQMSNLASGVPDRFSSSGSGTEFTLTISSVQPEDEGTYYCAQNLEIPRTFGQGTKLEIKRTPSHNSHQVPSAGGPTANSGTSGSQVQLQQSGGGLVKPGESVKISCAASGYTFTNYGMNWVKQAPGKGLKWMGWINTYTGESTYADDFKGRFTFSLETSASAAYLQINSLRPEDTAVYFCARFAIKGDYWGQGTTVTVSS

SEQ ID NO: 485 - DNA, 765 bp, Artificial Sequence
  Description of Artificial Sequence: Synthetic polynucleotide
gacatcgtcatgacccagtcaccgtcctcactgtcggcgtcggtgggtgataaggccacaattacatgccgcagcacgaaatcactgctccactccaatgggattacatatctctattggtatctccaaaaacccggaaaggcacctaagttgctgatctaccagatgtcgaacttggcatcgggagtacccgataggttctcgtcgtcgggaagcggcacggagttcacgctcaccatttcctcagtccagccggaggacgaaggaacttactactgcgctcagaatcttgaaatcccgcgcacatttggacaagggacgaaacttgaaatcaagcgaactccgtcccacaacagccatcaagtgccctcggcgggagggcccaccgccaattcggggacatcagggagccaggtacagttgcagcagtcgggaggcgggctggtaaaacctggtgaaagcgtcaagatctcatgtgcagcctcagggtatacgttcaccaattacgggatgaactgggtgaagcaggcgccagggaaaggtcttaagtggatgggatggatcaacacttacacgggagagtccacatacgcggatgactttaaggggcggttcacgttttcgttggagacttcagcgtccgctgcctacctccaaatcaactcccttagacccgaggacacagcggtctatttctgtgcgcggtttgccattaaaggtgattattggggacagggtacgactgtgaccgtgtccagctgataa

SEQ ID NO: 486 - protein, 112 aa, Artificial Sequence
  Description of Artificial Sequence: Synthetic polypeptide
DIVMTQSAFSNPVTLGTSASISCRSTKSLLHSNGITYLYWYLQKPGQSPQLLIYQMSNLASGVPDRFSSSGSGTDFTLRISRVEAEDVGVYYCAQNLEIPRTFGGGTKLEIK

SEQ ID NO: 487 - protein, 116 aa, Artificial Sequence
  Description of Artificial Sequence: Synthetic polypeptide
QVQLQQSGPELKKPGETVKISCKASGYTFTNYGMNWVKQAPGRGLKWMGWINTYTGESTYADDFKGRFAFSLETSASAAYLQINNLKNEDTATYFCARFAIKGDYWGQGTTLTVSS

SEQ ID NO: 488 - protein, 253 aa, Artificial Sequence
  Description of Artificial Sequence: Synthetic polypeptide
DIQMTQSPSSLSASVGDRVTITCRSTKSLLHSNGITYLYWYQQKPGKAPKLLIYQMSNLASGVPSRFSSSGSGTDFTLTISSLQPEDFATYYCAQNLEIPRTFGQGTKVELKRTPSHNSHQVPSAGGPTANSGTSGSEVQLVQSGPGLVQPGGSVRISCAASGYTFTNYGMNWVKQAPGKGLEWMGWINTYTGESTYADSFKGRFTFSLDTSASAAYLQINSLRAEDTAVYYCARFAIKGDYWGQGTLLTVSS

SEQ ID NO: 489 - protein, 1105 aa, Artificial Sequence
  Description of Artificial Sequence: Synthetic polypeptide
QLQLQESGPGLVKPSETLSLTCTVSGGSISSSVYYWSWIRQPPGKGLEWIGVIYPSGNTYYSPSLKSRVTISVDTSKNQFSLKLSSVTAADTAVYYCARTIYDLFDIWGQGTMVTVSSASTKGPSVFPLAPSSKSTSGGTAALGCLVKDYFPEPVTVSWNSGALTSGVHTFPAVLQSSGLYSLSSVVTVPSSSLGTQTYICNVNHKPSNTKVDKKVEPKSCDKTHTCPSCPAPEFLGGPSVFLFPPKPKDTLMISRTPEVTCVVVDVSQEDPEVQFNWYVDGVEVHNAKTKPREEQFNSKYRVVSVLTVLHQDWLNGKEYKCKVSNKGLPSSIEKTISKAKGQPREPQVYTLPPSREEMTKNQVSLSCAVKGFYPSDIAVEWESNGQPENNYKTTPPVLDSDGSFFLVSKLTVDKSRWQQGNVFSCSVMHEALHNHYTQKSLSLSKSCDKTGGGGSGGGGSGGGGSGGGGSGGGGSGGGGSGGGGSGGGGSCPSCPAPEFLGGPSVFLFPPKPKDTLMISRTPEVTCVVVDVSQEDPEVQFNWYVDGVEVHNAKTKPREEQFNSDYRVVSVLTVLHQDWLNGKEYKCKVSNKGLPSSIEKTISKAKGQPREPQVYTLPPSREEMTKNQVSLWCLVKGFYPSDIAVEWESNGQPENNYKTTPPVLDSDGSFFLYSKLTVDKSRWQQGNVFSCSVMHEALHNHYTQKSLSLSGECGGGGSGGGGSDIVMTQSPLSLPVTPGEPASISCRSTKSLLHSDGITYLYWYLQKPGQSPQLLIYQLSNLASGVPDRFSSSGSGTDFTLKISRVEAEDEGVYYCAQNLEIPRTFGCGTKLEIKRTGGGGSGGGGSGGGGSDIQMTQSPSSLSASVGDRVTITCRSTKSLLHSNGITYLYWYQQKPGKAPKLLIYQMSNLASGVPSRFSSSGSGTDFTLTISSLQPEDFATYYCAQNLEIPRTFGQGTKVELKRTPSHNSHQVPSAGGPTANSGTSGSEVQLVQSGPGLVQPGGSVRISCAASGYTFTNYGMNWVKQAPGKGLEWMGWINTYTGESTYADSFKGRFTFSLDTSASAAYLQINSLRAEDTAVYYCARFAIKGDYWGQGTLLTVSS

SEQ ID NO: 490 - protein, 40 aa, Artificial Sequence
  Description of Artificial Sequence: Synthetic polypeptide
  misc_feature (1)..(40): This sequence may encompass 4 to 8 'Gly Gly Gly Gly Ser' repeating units wherein some positions may be absent
  See specification as filed for detailed description of substitutions and preferred embodiments
GGGGSGGGGSGGGGSGGGGSGGGGSGGGGSGGGGSGGGGS

SEQ ID NO: 491 - protein, 40 aa, Artificial Sequence; identical to SEQ ID NO: 490
  Description of Artificial Sequence: Synthetic polypeptide

SEQ ID NO: 492 - protein, 5 aa, Artificial Sequence
  Description of Artificial Sequence: Synthetic peptide
GGGGS

SEQ ID NO: 493 - protein, 100 aa, Artificial Sequence
  Description of Artificial Sequence: Synthetic polypeptide
  misc_feature (1)..(100): This sequence may encompass 1 to 20 'Gly Gly Gly Gly Ser' repeating units wherein some positions may be absent
  See specification as filed for detailed description of substitutions and preferred embodiments
GGGGSGGGGSGGGGSGGGGSGGGGSGGGGSGGGGSGGGGSGGGGSGGGGSGGGGSGGGGSGGGGSGGGGSGGGGSGGGGSGGGGSGGGGSGGGGSGGGGS

SEQ ID NO: 494 - protein, 10 aa, Artificial Sequence
  Description of Artificial Sequence: Synthetic peptide
GGGGSGGGGS

SEQ ID NO: 495 - protein, 15 aa, Artificial Sequence
  Description of Artificial Sequence: Synthetic peptide
GGGGSGGGGSGGGGS

SEQ ID NO: 496 - protein, 20 aa, Artificial Sequence
  Description of Artificial Sequence: Synthetic peptide
GGGGSGGGGSGGGGSGGGGS

SEQ ID NO: 497 - protein, 25 aa, Artificial Sequence
  Description of Artificial Sequence: Synthetic peptide
GGGGSGGGGSGGGGSGGGGSGGGGS

SEQ ID NO: 498 - protein, 30 aa, Artificial Sequence
  Description of Artificial Sequence: Synthetic polypeptide
GGGGSGGGGSGGGGSGGGGSGGGGSGGGGS

SEQ ID NO: 499 - protein, 35 aa, Artificial Sequence
  Description of Artificial Sequence: Synthetic polypeptide
GGGGSGGGGSGGGGSGGGGSGGGGSGGGGSGGGGS

SEQ ID NO: 500 - protein, 45 aa, Artificial Sequence
  Description of Artificial Sequence: Synthetic polypeptide
  misc_feature (1)..(45): This sequence may encompass 1 to 15 'Gly Gly Ser' repeating units wherein some positions may be absent
  See specification as filed for detailed description of substitutions and preferred embodiments
GGSGGSGGSGGSGGSGGSGGSGGSGGSGGSGGSGGSGGSGGSGGS

SEQ ID NO: 501 - protein, 60 aa, Artificial Sequence
  Description of Artificial Sequence: Synthetic polypeptide
  misc_feature (1)..(60): This sequence may encompass 1 to 15 'Gly Ser Gly Ser' repeating units wherein some positions may be absent
  See specification as filed for detailed description of substitutions and preferred embodiments
GSGSGSGSGSGSGSGSGSGSGSGSGSGSGSGSGSGSGSGSGSGSGSGSGSGSGSGSGSGS

SEQ ID NO: 502 - protein, 25 aa, Artificial Sequence
  Description of Artificial Sequence: Synthetic peptide
  misc_feature (1)..(25): This sequence may encompass 1 to 5 'Gly Gly Gly Gly Ser' repeating units wherein some positions may be absent
  See specification as filed for detailed description of substitutions and preferred embodiments
GGGGSGGGGSGGGGSGGGGSGGGGS
